(19) United States
(12) Patent Application Publication
(10) Pub. No.: US 2004/0037842 A1
(43) Pub. Date: Feb. 26, 2004

(54) Compositions and methods for the therapy and diagnosis of colon cancer

(75) Inventors: Madeleine Joy Meagher, Seattle, WA (US); Gordon E. King, Shoreline, WA (US); Heather Secrist, Seattle, WA (US); Susan L. Harlocker, Seattle, WA (US); Jiangchun Xu, Bellevue, WA (US)

Correspondence Address: SEED INTELLECTUAL PROPERTY LAW GROUP PLLC, 701 FIFTH AVE, SUITE 6300, SEATTLE, WA, 98104-7092, US

(73) Assignee: Corixa Corporation, Seattle, WA

(21) Appl. No.: 10/097,105

(22) Filed: Mar. 13, 2002

Related U.S. Application Data
(63) Continuation-in-part of application No. 09/815,343, filed on Mar. 22, 2001, now abandoned.
(60) Provisional application No. 60/191,597, filed on Mar. 24, 2000.
(60) Provisional application No. 60/202,024, filed on May 4, 2000.
(60) Provisional application No. 60/202,189, filed on May 5, 2000.

(51) Int. Cl. A61K 39/00; C12Q 1/68; G01N 33/574; C07H 21/04; C12N 9/00

(52) U.S. Cl. 424/185.1; 435/7.23; 435/69.1; 435/6; 435/183; 435/320.1; 435/325; 536/23.2

(57) ABSTRACT

Compositions and methods for the therapy and diagnosis of cancer, particularly colon cancer, are disclosed. Illustrative compositions comprise one or more colon tumor polypeptides, immunogenic portions thereof, polynucleotides that encode such polypeptides, antigen presenting cell that expresses such polypeptides, and T cells that are specific for cells expressing such polypeptides. The disclosed compositions are useful, for example, in the diagnosis, prevention and/or treatment of diseases, particularly colon cancer.

### BACKGROUND OF THE INVENTION

[0001] 1. Field of the Invention

[0002] The present invention relates generally to therapy and diagnosis of cancer, such as colon cancer. The invention is more specifically related to polypeptides, comprising at least a portion of a colon tumor protein, and to polynucleotides encoding such polypeptides. Such polypeptides and polynucleotides are useful in pharmaceutical compositions, e.g., vaccines, and other compositions for the diagnosis and treatment of colon cancer.

[0003] 2. Description of the Related Art

[0004] Cancer is a significant health problem throughout the world. Although advances have been made in detection and therapy of cancer, no vaccine or other universally successful method for prevention and/or treatment is currently available. Current therapies, which are generally based on a combination of chemotherapy or surgery and radiation, continue to prove inadequate in many patients.

[0005] Colon cancer is the second most frequently diagnosed malignancy in the United States as well as the second most common cause of cancer death. The five-year survival rate for patients with colorectal cancer detected in an early localized stage is 92%; unfortunately, only 37% of colorectal cancer is diagnosed at this stage. The survival rate drops to 64% if the cancer is allowed to spread to adjacent organs or lymph nodes, and to 7% in patients with distant metastases.

[0006] The prognosis of colon cancer is directly related to the degree of penetration of the tumor through the bowel wall and the presence or absence of nodal involvement, consequently, early detection and treatment are especially important. Currently, diagnosis is aided by the use of screening assays for fecal occult blood, sigmoidoscopy, colonoscopy and double contrast barium enemas. Treatment regimens are determined by the type and stage of the cancer, and include surgery, radiation therapy and/or chemotherapy. Recurrence following surgery (the most common form of therapy) is a major problem and is often the ultimate cause of death. In spite of considerable research into therapies for the disease, colon cancer remains difficult to diagnose and treat. In spite of considerable research into therapies for these and other cancers, colon cancer remains difficult to diagnose and treat effectively. Accordingly, there is a need in the art for improved methods for detecting and treating such cancers. The present invention fulfills these needs and further provides other related advantages.

[0007] In spite of considerable research into therapies for these and other cancers, colon cancer remains difficult to diagnose and treat effectively. Accordingly, there is a need in the art for improved methods for detecting and treating such cancers. The present invention fulfills these needs and further provides other related advantages.

### BRIEF SUMMARY OF THE INVENTION

[0008] In one aspect, the present invention provides polynucleotide compositions comprising a sequence selected from the group consisting of:

[0009] (a) sequences provided in SEQ ID NOs: 1-1559;

[0010] (b) complements of the sequences provided in SEQ ID NOs: 1-1559;

[0011] (c) sequences consisting of at least 20, 25, 30, 35, 40, 45, 50, 75 and 100 contiguous residues of a sequence provided in SEQ ID NOs: 1-1559;

[0012] (d) sequences that hybridize to a sequence provided in SEQ ID NOs: 1-1559, under moderate or highly stringent conditions;

[0013] (e) sequences having at least 75%, 80%, 85%, 90%, 95%, 96%, 97%, 98% or 99% identity to a sequence of SEQ ID NOs: 1-1559;

[0014] (f) degenerate variants of a sequence provided in SEQ ID NOs: 1-1559.

[0015] In one preferred embodiment, the polynucleotide compositions of the invention are expressed in at least about 20%, more preferably in at least about 30%, and most preferably in at least about 50% of colon tumor samples tested, at a level that is at least about 2-fold, preferably at least about 5-fold, and most preferably at least about 10-fold higher than that for normal tissues.

[0016] The present invention, in another aspect, provides polypeptide compositions comprising an amino acid sequence that is encoded by a polynucleotide sequence described above.

[0017] The present invention further provides polypeptide compositions comprising an amino acid sequence selected from the group consisting of sequences recited in SEQ ID NOs: 1560-1562.

[0018] In certain preferred embodiments, the polypeptides and/or polynucleotides of the present invention are immunogenic, i.e., they are capable of eliciting an immune response, particularly a humoral and/or cellular immune response, as further described herein.

[0019] The present invention further provides fragments, variants and/or derivatives of the disclosed polypeptide and/or polynucleotide sequences, wherein the fragments, variants and/or derivatives preferably have a level of immunogenic activity of at least about 50%, preferably at least about 70% and more preferably at least about 90% of the level of immunogenic activity of a polypeptide sequence set forth in SEQ ID NOs: 1560-1562 or a polypeptide sequence encoded by a polynucleotide sequence set forth in SEQ ID NOs: 1-1559.

[0020] The present invention further provides polynucleotides that encode a polypeptide described above, expression vectors comprising such polynucleotides and host cells transformed or transfected with such expression vectors.

[0021] Within other aspects, the present invention provides pharmaceutical compositions comprising a polypeptide or polynucleotide as described above and a physiologically acceptable carrier.

[0022] Within a related aspect of the present invention, the pharmaceutical compositions, e.g., vaccine compositions, are provided for prophylactic or therapeutic applications. Such compositions generally comprise an immunogenic polypeptide or polynucleotide of the invention and an immunostimulant, such as an adjuvant.

[0023] The present invention further provides pharmaceutical compositions that comprise: (a) an antibody or antigen-binding fragment thereof that specifically binds to a polypeptide of the present invention, or a fragment thereof; and (b) a physiologically acceptable carrier.

[0024] Within further aspects, the present invention provides pharmaceutical compositions comprising: (a) an antigen presenting cell that expresses a polypeptide as described above and (b) a pharmaceutically acceptable carrier or excipient. Illustrative antigen presenting cells include dendritic cells, macrophages, monocytes, fibroblasts and B cells.

[0025] Within related aspects, pharmaceutical compositions are provided that comprise: (a) an antigen presenting cell that expresses a polypeptide as described above and (b) an immunostimulant.

[0026] The present invention further provides, in other aspects, fusion proteins that comprise at least one polypeptide as described above, as well as polynucleotides encoding such fusion proteins, typically in the form of pharmaceutical compositions, e.g., vaccine compositions, comprising a physiologically acceptable carrier and/or an immunostimulant. The fusions proteins may comprise multiple immunogenic polypeptides or portions/variants thereof, as described herein, and may further comprise one or more polypeptide segments for facilitating the expression, purification and/or immunogenicity of the polypeptide(s).

[0027] Within further aspects, the present invention provides methods for stimulating an immune response in a patient, preferably a T cell response in a human patient, comprising administering a pharmaceutical composition described herein. The patient may be afflicted with colon cancer, in which case the methods provide treatment for the disease, or patient considered at risk for such a disease may be treated prophylactically.

[0028] Within further aspects, the present invention provides methods for inhibiting the development of a cancer in a patient, comprising administering to a patient a pharmaceutical composition as recited above. The patient may be afflicted with colon cancer, in which case the methods provide treatment for the disease, or patient considered at risk for such a disease may be treated prophylactically.

[0029] The present invention further provides, within other aspects, methods for removing tumor cells from a biological sample, comprising contacting a biological sample With T cells that specifically react with a polypeptide of the present invention, wherein the step of contacting is performed under conditions and for a time sufficient to permit the removal of cells expressing the protein from the sample.

[0030] Within related aspects, methods are provided for inhibiting the development of a cancer in a patient, comprising administering to a patient a biological sample treated as described above.

[0031] Methods are further provided, within other aspects, for stimulating and/or expanding T cells specific for a polypeptide of the present invention, comprising contacting T cells with one or more of: (i) a polypeptide as described above; (ii) a polynucleotide encoding such a polypeptide; and/or (iii) an antigen presenting cell that expresses such a polypeptide; under conditions and for a time sufficient to permit the stimulation and/or expansion of T cells. Isolated T cell populations comprising T cells prepared as described above are also provided.

[0032] Within further aspects, the present invention provides methods for inhibiting the development of a cancer in a patient, comprising administering to a patient an effective amount of a T cell population as described above.

[0033] The present invention further provides methods for inhibiting the development of a cancer in a patient, comprising the steps of: (a) incubating CD4⁺ and/or CD8⁺ T cells isolated from a patient with one or more of: (i) a polypeptide comprising at least an immunogenic portion of polypeptide disclosed herein; (ii) a polynucleotide encoding such a polypeptide; and (iii) an antigen-presenting cell that expressed such a polypeptide; and (b) administering to the patient an effective amount of the proliferated T cells, and thereby inhibiting the development of a cancer in the patient. Proliferated cells may, but need not, be cloned prior to administration to the patient.

[0034] Within further aspects, the present invention provides methods for determining the presence or absence of a cancer, preferably a colon cancer, in a patient comprising: (a) contacting a biological sample obtained from a patient with a binding agent that binds to a polypeptide as recited above; (b) detecting in the sample an amount of polypeptide that binds to the binding agent; and (c) comparing the amount of polypeptide with a predetermined cut-off value, and therefrom determining the presence or absence of a cancer in the patient. Within preferred embodiments, the binding agent is an antibody, more preferably a monoclonal antibody.

[0035] The present invention also provides, within other aspects, methods for monitoring the progression of a cancer in a patient. Such methods comprise the steps of: (a) contacting a biological sample obtained from a patient at a first point in time with a binding agent that binds to a polypeptide as recited above; (b) detecting in the sample an amount of polypeptide that binds to the binding agent; (c) repeating steps (a) and (b) using a biological sample obtained from the patient at a subsequent point in time; and (d) comparing the amount of polypeptide detected in step (c) with the amount detected in step (b) and therefrom monitoring the progression of the cancer in the patient.

[0036] The present invention further provides, within other aspects, methods for determining the presence or absence of a cancer in a patient, comprising the steps of: (a) contacting a biological sample, e.g., tumor sample, serum sample, etc., obtained from a patient with an oligonucleotide that hybridizes to a polynucleotide that encodes a polypeptide of the present invention; (b) detecting in the sample a level of a polynucleotide, preferably mRNA, that hybridizes to the oligonucleotide; and (c) comparing the level of polynucleotide that hybridizes to the oligonucleotide with a predetermined cut-off value, and therefrom determining the presence or absence of a cancer in the patient. Within certain embodiments, the amount of mRNA is detected via polymerase chain reaction using, for example, at least one oligonucleotide primer that hybridizes to a polynucleotide encoding a polypeptide as recited above, or a complement of such a polynucleotide. Within other embodiments, the amount of mRNA is detected using a hybridization technique, employing an oligonucleotide probe that hybridizes to a polynucleotide that encodes a polypeptide as recited above, or a complement of such a polynucleotide.

[0037] In related aspects, methods are provided for monitoring the progression of a cancer in a patient, comprising the steps of: (a) contacting a biological sample obtained from a patient with an oligonucleotide that hybridizes to a polynucleotide that encodes a polypeptide of the present invention; (b) detecting in the sample an amount of a polynucleotide that hybridizes to the oligonucleotide; (c) repeating steps (a) and (b) using a biological sample obtained from the patient at a subsequent point in time; and (d) comparing the amount of polynucleotide detected in step (c) with the amount detected in step (b) and therefrom monitoring the progression of the cancer in the patient.

[0038] Within further aspects, the present invention provides antibodies, such as monoclonal antibodies, that bind to a polypeptide as described above, as well as diagnostic kits comprising such antibodies. Diagnostic kits comprising one or more oligonucleotide probes or primers as described above are also provided.

[0039] These and other aspects of the present invention will become apparent upon reference to the following detailed description. All references disclosed herein are hereby incorporated by reference in their entirety as if each was incorporated individually.

### BRIEF DESCRIPTION OF THE SEQUENCE IDENTIFIERS

[0040] SEQ ID NOs: 1-1556 are the determined cDNA sequences for clones isolated from subtracted libraries CPS1 and CPS2 as described in Example 1.

[0041] SEQ ID NO: 1557 is the determined full length cDNA sequence for the HOXB6 gene set forth in Genbank accession number NM_{—}018952.

[0042] SEQ ID NO: 1558 is the determined full length cDNA sequence for the HOXB7 gene set forth in Genbank accession number XM_{—}008559.

[0043] SEQ ID NO: 1559 is the determined full length cDNA sequence for the HOXB9 gene set forth in Genbank accession number NM_{—}024017.

[0044] SEQ ID NO: 1560 is the full length amino acid sequence of HOXB6, encoded by the nucleotide sequence set forth in SEQ ID NO: 1557.

[0045] SEQ ID NO: 1561 is the full length amino acid sequence of HOXB7, encoded by the nucleotide sequence set forth in SEQ ID NO: 1558.

[0046] SEQ ID NO: 1562 is the full length amino acid sequence of HOXB9, encoded by the nucleotide sequence set forth in SEQ ID NO: 1559.

### DETAILED DESCRIPTION OF THE INVENTION

[0047] U.S. patents, U.S. patent application publications, U.S. patent applications, foreigh patents, foreign patent applications and non-patent publications referred to in this specification and/or listed in the Application Data Sheet, are incorporated herein by reference, in their entirety.

[0048] The present invention is directed generally to compositions and their use in the therapy and diagnosis of cancer, particularly colon cancer. As described further below, illustrative compositions of the present invention include, but are not restricted to, polypeptides, particularly immunogenic polypeptides, polynucleotides encoding such polypeptides, antibodies and other binding agents, antigen presenting cells (APCs) and immune system cells (e.g., T cells).

[0049] The practice of the present invention will employ, unless indicated specifically to the contrary, conventional methods of virology, immunology, microbiology, molecular biology and recombinant DNA techniques within the skill of the art, many of which are described below for the purpose of illustration. Such techniques are explained fully in the literature. See, e.g., Sambrook, et al. Molecular Cloning: A Laboratory Manual (2nd Edition, 1989); Maniatis et al. Molecular Cloning: A Laboratory Manual (1982); DNA Cloning: A Practical Approach, vol. I & II (D. Glover, ed.); Oligonucleotide Synthesis (N. Gait, ed., 1984); Nucleic Acid Hybridization (B. Hames & S. Higgins, eds., 1985); Transcription and Translation (B. Hames & S. Higgins, eds., 1984); Animal Cell Culture (R. Freshney, ed., 1986); Perbal, A Practical Guide to Molecular Cloning (1984).

[0050] All publications, patents and patent applications cited herein, whether supra or infra, are hereby incorporated by reference in their entirety.

[0051] As used in this specification and the appended claims, the singular forms “a,” “an” and “the” include plural references unless the content clearly dictates otherwise.

[0052] Polypeptide Compositions

[0053] As used herein, the term “polypeptide”” is used in its conventional meaning, i.e., as a sequence of amino acids. The polypeptides are not limited to a specific length of the product; thus, peptides, oligopeptides, and proteins are included within the definition of polypeptide, and such terms may be used interchangeably herein unless specifically indicated otherwise. This term also does not refer to or exclude post-expression modifications of the polypeptide, for example, glycosylations, acetylations, phosphorylations and the like, as well as other modifications known in the art, both naturally occurring and non-naturally occurring. A polypeptide may be an entire protein, or a subsequence thereof. Particular polypeptides of interest in the context of this invention are amino acid subsequences comprising epitopes, i.e., antigenic determinants substantially responsible for the immunogenic properties of a polypeptide and being capable of evoking an immune response.

[0054] Particularly illustrative polypeptides of the present invention comprise those encoded by a polynucleotide sequence set forth in any one of SEQ ID NOs: 1-1559, or a sequence that hybridizes under moderately stringent conditions, or, alternatively, under highly stringent conditions, to a polynucleotide sequence set forth in any one of SEQ ID NOs: 1-1559. Certain other illustrative polypeptides of the invention comprise amino acid sequences as set forth in any one of SEQ ID NOs: 1560-1562.

[0055] The polypeptides of the present invention are sometimes herein referred to as colon tumor proteins or colon tumor polypeptides, as an indication that their identification has been based at least in part upon their increased levels of expression in colon tumor samples. Thus, a “colon tumor polypeptide” or “colon tumor protein,” refers generally to a polypeptide sequence of the present invention, or a polynucleotide sequence encoding such a polypeptide, that is expressed in a substantial proportion of colon tumor samples, for example preferably greater than about 20%, more preferably greater than about 30%, and most preferably greater than about 50% or more of colon tumor samples tested, at a level that is at least two fold, and preferably at least five fold, greater than the level of expression in normal tissues, as determined using a representative assay provided herein. A colon tumor polypeptide sequence of the invention, based upon its increased level of expression in tumor cells, has particular utility both as a diagnostic marker as well as a therapeutic target, as further described below.

[0056] In certain preferred embodiments, the polypeptides of the invention are immunogenic, i.e., they react detectably within an immunoassay (such as an ELISA or T-cell stimulation assay) with antisera and/or T-cells from a patient with colon cancer. Screening for immunogenic activity can be performed using techniques well known to the skilled artisan. For example, such screens can be performed using methods such as those described in Harlow and Lane, Antibodies: A Laboratory Manual, Cold Spring Harbor Laboratory, 1988. In one illustrative example, a polypeptide may be immobilized on a solid support and contacted with patient sera to allow binding of antibodies within the sera to the immobilized polypeptide. Unbound sera may then be removed and bound antibodies detected using, for example, ¹²⁵I-labeled Protein A.

[0057] As would be recognized by the skilled artisan, immunogenic portions of the polypeptides disclosed herein are also encompassed by the present invention. An “immunogenic portion,” as used herein, is a fragment of an immunogenic polypeptide of the invention that itself is immunologically reactive (i.e., specifically binds) with the B-cells and/or T-cell surface antigen receptors that recognize the polypeptide. Immunogenic portions may generally be identified using well known techniques, such as those summarized in Paul, Fundamental Immunology, 3rd ed., 243-247 (Raven Press, 1993) and references cited therein. Such techniques include screening polypeptides for the ability to react with antigen-specific antibodies, antisera and/or T-cell lines or clones. As used herein, antisera and antibodies are “antigen-specific” if they specifically bind to an antigen (i.e., they react with the protein in an ELISA or other immunoassay, and do not react detectably with unrelated proteins). Such antisera and antibodies may be prepared as described herein, and using well-known techniques.

[0058] In one preferred embodiment, an immunogenic portion of a polypeptide of the present invention is a portion that reacts with antisera and/or T-cells cells at a level that is not substantially less than the reactivity of the full-length polypeptide (e.g., in an ELISA and/or T-cell reactivity assay). Preferably, the level of immunogenic activity of the immunogenic portion is at least about 50%, preferably at least about 70% and most preferably greater than about 90% of the immunogenicity for the full-length polypeptide. In some instances, preferred immunogenic portions will be identified that have a level of immunogenic activity greater than that of the corresponding full-length polypeptide, e.g., having greater than about 100% or 150% or more immunogenic activity.

[0059] In certain other embodiments, illustrative immunogenic portions may include peptides in which an N-terminal leader sequence and/or transmembrane domain have been deleted. Other illustrative immunogenic portions will contain a small N- and/or C-terminal deletion (e.g., 1-30 amino acids, preferably 5-15 amino acids), relative to the mature protein.

[0060] In another embodiment, a polypeptide composition of the invention may also comprise one or more polypeptides that are immunologically reactive with T cells and/or antibodies generated against a polypeptide of the invention, particularly a polypeptide having an amino acid sequence disclosed herein, or to an immunogenic fragment or variant thereof.

[0061] In another embodiment of the invention, polypeptides are provided that comprise one or more polypeptides that are capable of eliciting T cells and/or antibodies that are immunologically reactive with one or more polypeptides described herein, or one or more polypeptides encoded by contiguous nucleic acid sequences contained in the polynucleotide sequences disclosed herein, or immunogenic fragments or variants thereof, or to one or more nucleic acid sequences which hybridize to one or more of these sequences under conditions of moderate to high stringency.

[0062] The present invention, in another aspect, provides polypeptide fragments comprising at least about 5, 10, 15, 20, 25, 50, or 100 contiguous amino acids, or more, including all intermediate lengths, of a polypeptide compositions set forth herein, such as those set forth in SEQ ID NOs: 1560-1562, or those encoded by a polynucleotide sequence set forth in a sequence of SEQ ID NOs: 1-1559.

[0063] In another aspect, the present invention provides variants of the polypeptide compositions described herein. Polypeptide variants generally encompassed by the present invention will typically exhibit at least about 70%, 75%, 80%, 85%, 90%, 91%, 92%, 93%, 94%, 95%, 96%, 97%, 98%, or 99% or more identity (determined as described below), along its length, to a polypeptide sequences set forth herein.

[0064] In one preferred embodiment, the polypeptide fragments and variants provided by the present invention are immunologically reactive with an antibody and/or T-cell that reacts with a full-length polypeptide specifically set forth herein.

[0065] In another preferred embodiment, the polypeptide fragments and variants provided by the present invention exhibit a level of immunogenic activity of at least about 50%, preferably at least about 70%, and most preferably at least about 90% or more of that exhibited by a full-length polypeptide sequence specifically set forth herein.

[0066] A polypeptide “variant,” as the term is used herein, is a polypeptide that typically differs from a polypeptide specifically disclosed herein in one or more substitutions, deletions, additions and/or insertions. Such variants may be naturally occurring or may be synthetically generated, for example, by modifying one or more of the above polypeptide sequences of the invention and evaluating their immunogenic activity as described herein and/or using any of a number of techniques well known in the art.

[0067] For example, certain illustrative variants of the polypeptides of the invention include those in which one or more portions, such as an N-terminal leader sequence or transmembrane domain, have been removed. Other illustrative variants include variants in which a small portion (e.g., 1-30 amino acids, preferably 5-15 amino acids) has been removed from the N- and/or C-terminal of the mature protein.

[0068] In many instances, a variant will contain conservative substitutions. A “conservative substitution” is one in which an amino acid is substituted for another amino acid that has similar properties, such that one skilled in the art of peptide chemistry would expect the secondary structure and hydropathic nature of the polypeptide to be substantially unchanged. As described above, modifications may be made in the structure of the polynucleotides and polypeptides of the present invention and still obtain a functional molecule that encodes a variant or derivative polypeptide with desirable characteristics, e.g., with immunogenic characteristics. When it is desired to alter the amino acid sequence of a polypeptide to create an equivalent, or even an improved, immunogenic variant or portion of a polypeptide of the invention, one skilled in the art will typically change one or more of the codons of the encoding DNA sequence according to Table 1.

[0069] For example, certain amino acids may be substituted for other amino acids in a protein structure without appreciable loss of interactive binding capacity with structures such as, for example, antigen-binding regions of antibodies or binding sites on substrate molecules. Since it is the interactive capacity and nature of a protein that defines that protein's biological functional activity, certain amino acid sequence substitutions can be made in a protein sequence, and, of course, its underlying DNA coding sequence, and nevertheless obtain a protein with like properties. It is thus contemplated that various changes may be made in the peptide sequences of the disclosed compositions, or corresponding DNA sequences which encode said peptides without appreciable loss of their biological utility or activity.

TABLE 1

| Amino Acids | | | Codons |
|---|---|---|---|
| Alanine | Ala | A | GCA GCC GCG GCU |
| Cysteine | Cys | C | UGC UGU |
| Aspartic acid | Asp | D | GAC GAU |
| Glutamic acid | Glu | E | GAA GAG |
| Phenylalanine | Phe | F | UUC UUU |
| Glycine | Gly | G | GGA GGC GGG GGU |
| Histidine | His | H | CAC CAU |
| Isoleucine | Ile | I | AUA AUC AUU |
| Lysine | Lys | K | AAA AAG |
| Leucine | Leu | L | UUA UUG CUA CUC CUG CUU |
| Methionine | Met | M | AUG |
| Asparagine | Asn | N | AAC AAU |
| Proline | Pro | P | CCA CCC CCG CCU |
| Glutamine | Gln | Q | CAA CAG |
| Arginine | Arg | R | AGA AGG CGA CGC CGG CGU |
| Serine | Ser | S | AGC AGU UCA UCC UCG UCU |
| Threonine | Thr | T | ACA ACC ACG ACU |
| Valine | Val | V | GUA GUC GUG GUU |
| Tryptophan | Trp | W | UGG |
| Tyrosine | Tyr | Y | UAC UAU |

[0070] In making such changes, the hydropathic index of amino acids may be considered. The importance of the hydropathic amino acid index in conferring interactive biologic function on a protein is generally understood in the art (Kyte and Doolittle, 1982, incorporated herein by reference). It is accepted that the relative hydropathic character of the amino acid contributes to the secondary structure of the resultant protein, which in turn defines the interaction of the protein with other molecules, for example, enzymes, substrates, receptors, DNA, antibodies, antigens, and the like. Each amino acid has been assigned a hydropathic index on the basis of its hydrophobicity and charge characteristics (Kyte and Doolittle, 1982). These values are: isoleucine (+4.5); valine (+4.2); leucine (+3.8); phenylalanine (+2.8); cysteine/cystine (+2.5); methionine (+1.9); alanine (+1.8); glycine (−0.4); threonine (−0.7); serine (−0.8); tryptophan (−0.9); tyrosine (−1.3); proline (−1.6); histidine (−3.2); glutamate (−3.5); glutamine (−3.5); aspartate (−3.5); asparagine (−3.5); lysine (−3.9); and arginine (−4.5).

[0071] It is known in the art that certain amino acids may be substituted by other amino acids having a similar hydropathic index or score and still result in a protein with similar biological activity, i.e. still obtain a biological functionally equivalent protein. In making such changes, the substitution of amino acids whose hydropathic indices are within ±2 is preferred, those within ±1 are particularly preferred, and those within ±0.5 are even more particularly preferred. It is also understood in the art that the substitution of like amino acids can be made effectively on the basis of hydrophilicity. U. S. Pat. No. 4,554,101 (specifically incorporated herein by reference in its entirety), states that the greatest local average hydrophilicity of a protein, as governed by the hydrophilicity of its adjacent amino acids, correlates with a biological property of the protein.

[0072] As detailed in U. S. Pat. No. 4,554,101, the following hydrophilicity values have been assigned to amino acid residues: arginine (+3.0); lysine (+3.0); aspartate (+3.0±1); glutamate (+3.0±1); serine (+0.3); asparagine (+0.2); glutamine (+0.2); glycine (0); threonine (−0.4); proline (−0.5±1); alanine (−0.5); histidine (−0.5); cysteine (−1.0); methionine (−1.3); valine (−1.5); leucine (−1.8); isoleucine (−1.8); tyrosine (−2.3); phenylalanine (−2.5); tryptophan (−3.4). It is understood that an amino acid can be substituted for another having a similar hydrophilicity value and still obtain a biologically equivalent, and in particular, an immunologically equivalent protein. In such changes, the substitution of amino acids whose hydrophilicity values are within ±2 is preferred, those within ±1 are particularly preferred, and those within ±0.5 are even more particularly preferred.

[0073] As outlined above, amino acid substitutions are generally therefore based on the relative similarity of the amino acid side-chain substituents, for example, their hydrophobicity, hydrophilicity, charge, size, and the like. Exemplary substitutions that take various of the foregoing characteristics into consideration are well known to those of skill in the art and include: arginine and lysine; glutamate and aspartate; serine and threonine; glutamine and asparagine; and valine, leucine and isoleucine.

[0074] In addition, any polynucleotide may be further modified to increase stability in vivo. Possible modifications include, but are not limited to, the addition of flanking sequences at the 5′ and/or 3′ ends; the use of phosphorothioate or 2′ O-methyl rather than phosphodiesterase linkages in the backbone; and/or the inclusion of nontraditional bases such as inosine, queosine and wybutosine, as well as acetyl-methyl-, thio- and other modified forms of adenine, cytidine, guanine, thymine and uridine.

[0075] Amino acid substitutions may further be made on the basis of similarity in polarity, charge, solubility, hydrophobicity, hydrophilicity and/or the amphipathic nature of the residues. For example, negatively charged amino acids include aspartic acid and glutamic acid; positively charged amino acids include lysine and arginine; and amino acids with uncharged polar head groups having similar hydrophilicity values include leucine, isoleucine and valine; glycine and alanine; asparagine and glutamine; and serine, threonine, phenylalanine and tyrosine. Other groups of amino acids that may represent conservative changes include: (1) ala, pro, gly, glu, asp, gin, asn, ser, thr; (2) cys, ser, tyr, thr; (3) val, ile, leu, met, ala, phe; (4) lys, arg, his; and (5) phe, tyr, trp, his. A variant may also, or alternatively, contain nonconservative changes. In a preferred embodiment, variant polypeptides differ from a native sequence by substitution, deletion or addition of five amino acids or fewer. Variants may also (or alternatively) be modified by, for example, the deletion or addition of amino acids that have minimal influence on the immunogenicity, secondary structure and hydropathic nature of the polypeptide.

[0076] As noted above, polypeptides may comprise a signal (or leader) sequence at the N-terminal end of the protein, which co-translationally or post-translationally directs transfer of the protein. The polypeptide may also be conjugated to a linker or other sequence for ease of synthesis, purification or identification of the polypeptide (e.g., poly-His), or to enhance binding of the polypeptide to a solid support. For example, a polypeptide may be conjugated to an immunoglobulin Fc region.

[0077] When comparing polypeptide sequences, two sequences are said to be “identical” if the sequence of amino acids in the two sequences is the same when aligned for maximum correspondence, as described below. Comparisons between two sequences are typically performed by comparing the sequences over a comparison window to identify and compare local regions of sequence similarity. A “comparison window” as used herein, refers to a segment of at least about 20 contiguous positions, usually 30 to about 75, 40 to about 50, in which a sequence may be compared to a reference sequence of the same number of contiguous positions after the two sequences are optimally aligned.

[0078] Optimal alignment of sequences for comparison may be conducted using the Megalign program in the Lasergene suite of bioinformatics software (DNASTAR, Inc., Madison, Wis.), using default parameters. This program embodies several alignment schemes described in the following references: Dayhoff, M. O. (1978) A model of evolutionary change in proteins—Matrices for detecting distant relationships. In Dayhoff, M. O. (ed.) Atlas of Protein Sequence and Structure, National Biomedical Research Foundation, Washington D.C. Vol. 5, Suppl. 3, pp. 345-358; Hein J. (1990) Unified Approach to Alignment and Phylogenes pp. 626-645 Methods in Enzymology vol. 183, Academic Press, Inc., San Diego, Calif.; Higgins, D. G. and Sharp, P. M. (1989) CABIOS 5:151-153; Myers, E. W. and Muller W. (1988) CABIOS4:11-17; Robinson, E. D. (1971) Comb. Theor 11:105; Saitou, N. Nei, M. (1987) Mol. Biol. Evol. 4:406-425; Sneath, P. H. A. and Sokal, R. R. (1973) Numerical Taxonomy—the Principles and Practice of Numerical Taxonomy, Freeman Press, San Francisco, Calif.; Wilbur, W. J. and Lipman, D. J. (1983) Proc. Natl. Acad., Sci. USA 80:726-730.

[0079] Alternatively, optimal alignment of sequences for comparison may be conducted by the local identity algorithm of Smith and Waterman (1981) Add. APL. Math 2:482, by the identity alignment algorithm of Needleman and Wunsch (1970) J. Mol. Biol. 48:443, by the search for similarity methods of Pearson and Lipman (1988) Proc. Natl. Acad. Sci. USA 85: 2444, by computerized implementations of these algorithms (GAP, BESTFIT, BLAST, FASTA, and TFASTA in the Wisconsin Genetics Software Package, Genetics Computer Group (GCG), 575 Science Dr., Madison, Wis.), or by inspection.

[0080] One preferred example of algorithms that are suitable for determining percent sequence identity and sequence similarity are the BLAST and BLAST 2.0 algorithms, which are described in Altschul et al. (1977) Nucl. Acids Res. 25:3389-3402 and Altschul et al. (1990) J. Mol. Biol. 215:403-410, respectively. BLAST and BLAST 2.0 can be used, for example with the parameters described herein, to determine percent sequence identity for the polynucleotides and polypeptides of the invention. Software for performing BLAST analyses is publicly available through the National Center for Biotechnology Information. For amino acid sequences, a scoring matrix can be used to calculate the cumulative score. Extension of the word hits in each direction are halted when: the cumulative alignment score falls off by the quantity X from its maximum achieved value; the cumulative score goes to zero or below, due to the accumulation of one or more negative-scoring residue alignments; or the end of either sequence is reached. The BLAST algorithm parameters W, T and X determine the sensitivity and speed of the alignment.

[0081] In one preferred approach, the “percentage of sequence identity” is determined by comparing two optimally aligned sequences over a window of comparison of at least 20 positions, wherein the portion of the polypeptide sequence in the comparison window may comprise additions or deletions (i.e., gaps) of 20 percent or less, usually 5 to 15 percent, or 10 to 12 percent, as compared to the reference sequences (which does not comprise additions or deletions) for optimal alignment of the two sequences. The percentage is calculated by determining the number of positions at which the identical amino acid residue occurs in both sequences to yield the number of matched positions, dividing the number of matched positions by the total number of positions in the reference sequence (i.e., the window size) and multiplying the results by 100 to yield the percentage of sequence identity.

[0082] Within other illustrative embodiments, a polypeptide may be a xenogeneic polypeptide that comprises an polypeptide having substantial sequence identity, as described above, to the human polypeptide (also termed autologous antigen) which served as a reference polypeptide, but which xenogeneic polypeptide is derived from a different, non-human species. One skilled in the art will recognize that “self” antigens are often poor stimulators of CD8+ and CD4+ T-lymphocyte responses, and therefore efficient immunotherapeutic strategies directed against tumor polypeptides require the development of methods to overcome immune tolerance to particular self tumor polypeptides. For example, humans immunized with prostase protein from a xenogeneic (non human) origin are capable of mounting an immune response against the counterpart human protein, e.g. the human prostase tumor protein present on human tumor cells. Accordingly, the present invention provides methods for purifying the xenogeneic form of the tumor proteins set forth herein, such as the polypeptides set forth in SEQ ID NOs: 1560-1562, or those encoded by polynucleotide sequences set forth in SEQ ID NOs: 1-1559.

[0083] Therefore, one aspect of the present invention provides xenogeneic variants of the polypeptide compositions described herein. Such xenogeneic variants generally encompassed by the present invention will typically exhibit at least about 70%, 75%, 80%, 85%, 90%, 91%, 92%, 93%, 94%, 95%, 96%, 97%, 98%, or 99% or more identity along their lengths, to a polypeptide sequences set forth herein.

[0084] More particularly, the invention is directed to mouse, rat, monkey, porcine and other non-human polypeptides which can be used as xenogeneic forms of human polypeptides set forth herein, to induce immune responses directed against tumor polypeptides of the invention.

[0085] Within other illustrative embodiments, a polypeptide may be a fusion polypeptide that comprises multiple polypeptides as described herein, or that comprises at least one polypeptide as described herein and an unrelated sequence, such as a known tumor protein. A fusion partner may, for example, assist in providing T helper epitopes (an immunological fusion partner), preferably T helper epitopes recognized by humans, or may assist in expressing the protein (an expression enhancer) at higher yields than the native recombinant protein. Certain preferred fusion partners are both immunological and expression enhancing fusion partners. Other fusion partners may be selected so as to increase the solubility of the polypeptide or to enable the polypeptide to be targeted to desired intracellular compartments. Still further fusion partners include affinity tags, which facilitate purification of the polypeptide.

[0086] Fusion polypeptides may generally be prepared using standard techniques, including chemical conjugation. Preferably, a fusion polypeptide is expressed as a recombinant polypeptide, allowing the production of increased levels, relative to a non-fused polypeptide, in an expression system. Briefly, DNA sequences encoding the polypeptide components may be assembled separately, and ligated into an appropriate expression vector. The 3′ end of the DNA sequence encoding one polypeptide component is ligated, with or without a peptide linker, to the 5′ end of a DNA sequence encoding the second polypeptide component so that the reading frames of the sequences are in phase. This permits translation into a single fusion polypeptide that retains the biological activity of both component polypeptides.

[0087] A peptide linker sequence may be employed to separate the first and second polypeptide components by a distance sufficient to ensure that each polypeptide folds into its secondary and tertiary structures. Such a peptide linker sequence is incorporated into the fusion polypeptide using standard techniques well known in the art. Suitable peptide linker sequences may be chosen based on the following factors: (1) their ability to adopt a flexible extended conformation; (2) their inability to adopt a secondary structure that could interact with functional epitopes on the first and second polypeptides; and (3) the lack of hydrophobic or charged residues that might react with the polypeptide functional epitopes. Preferred peptide linker sequences contain Gly, Asn and Ser residues. Other near neutral amino acids, such as Thr and Ala may also be used in the linker sequence. Amino acid sequences which may be usefully employed as linkers include those disclosed in Maratea et al., Gene 40:39-46,1985; Murphy et al., Proc. Natl. Acad. Sci. USA 83:8258-8262, 1986; U.S. Pat. No. 4,935,233 and U.S. Pat. No. 4,751,180. The linker sequence may generally be from 1 to about 50 amino acids in length. Linker sequences are not required when the first and second polypeptides have non-essential N-terminal amino acid regions that can be used to separate the functional domains and prevent steric interference.

[0088] The ligated DNA sequences are operably linked to suitable transcriptional or translational regulatory elements. The regulatory elements responsible for expression of DNA are located only 5′ to the DNA sequence encoding the first polypeptides. Similarly, stop codons required to end translation and transcription termination signals are only present 3′ to the DNA sequence encoding the second polypeptide.

[0089] The fusion polypeptide can comprise a polypeptide as described herein together with an unrelated immunogenic protein, such as an immunogenic protein capable of eliciting a recall response. Examples of such proteins include tetanus, tuberculosis and hepatitis proteins (see, for example, Stoute et al. New Engl. J. Med., 336:86-91,1997).

[0090] In one preferred embodiment, the immunological fusion partner is derived from a Mycobacterium sp., such as a Mycobacterium tuberculosis-derived Ra12 fragment. Ra12 compositions and methods for their use in enhancing the expression and/or immunogenicity of heterologous polynucleotide/polypeptide sequences is described in U.S. patent application Ser. No. 60/158,585, the disclosure of which is incorporated herein by reference in its entirety. Briefly, Ra12 refers to a polynucleotide region that is a subsequence of a Mycobacterium tuberculosis MTB32A nucleic acid. MTB32A is a serine protease of 32 KD molecular weight encoded by a gene in virulent and avirulent strains of M. tuberculosis. The nucleotide sequence and amino acid sequence of MTB32A have been described (for example, U.S. patent application Ser. No. 60/158,585; see also, Skeiky et al., Infection and Immun. (1999) 67:3998-4007, incorporated herein by reference). C-terminal fragments of the MTB32A coding sequence express at high levels and remain as a soluble polypeptides throughout the purification process. Moreover, Ra12 may enhance the immunogenicity of heterologous immunogenic polypeptides with which it is fused. One preferred Ra12 fusion polypeptide comprises a 14 KD C-terminal fragment corresponding to amino acid residues 192 to 323 of MTB32A. Other preferred Ra12 polynucleotides generally comprise at least about 15 consecutive nucleotides, at least about 30 nucleotides, at least about 60 nucleotides, at least about 100 nucleotides, at least about 200 nucleotides, or at least about 300 nucleotides that encode a portion of a Ra12 polypeptide. Ra12 polynucleotides may comprise a native sequence (i.e., an endogenous sequence that encodes a Ra12 polypeptide or a portion thereof) or may comprise a variant of such a sequence. Ra12 polynucleotide variants may contain one or more substitutions, additions, deletions and/or insertions such that the biological activity of the encoded fusion polypeptide is not substantially diminished, relative to a fusion polypeptide comprising a native Ra12 polypeptide. Variants preferably exhibit at least about 70% identity, more preferably at least about 80% identity and most preferably at least about 90% identity to a polynucleotide sequence that encodes a native Ra12 polypeptide or a portion thereof.

[0091] Within other preferred embodiments, an immunological fusion partner is derived from protein D, a surface protein of the gram-negative bacterium Haemophilus influenza B (WO 91/18926). Preferably, a protein D derivative comprises approximately the first third of the protein (e.g., the first N-terminal 100-110 amino acids), and a protein D derivative may be lipidated. Within certain preferred embodiments, the first 109 residues of a Lipoprotein D fusion partner is included on the N-terminus to provide the polypeptide with additional exogenous T-cell epitopes and to increase the expression level in E. coli (thus functioning as an expression enhancer). The lipid tail ensures optimal presentation of the antigen to antigen presenting cells. Other fusion partners include the non-structural protein from influenzae virus, NS1 (hemaglutinin). Typically, the N-terminal 81 amino acids are used, although different fragments that include T-helper epitopes may be used.

[0092] In another embodiment, the immunological fusion partner is the protein known as LYTA, or a portion thereof (preferably a C-terminal portion). LYTA is derived from Streptococcus pneumoniae, which synthesizes an N-acetyl-L-alanine amidase known as amidase LYTA (encoded by the LytA gene; Gene 43:265-292,1986). LYTA is an autolysin that specifically degrades certain bonds in the peptidoglycan backbone. The C-terminal domain of the LYTA protein is responsible for the affinity to the choline or to some choline analogues such as DEAE. This property has been exploited for the development of E. coli C-LYTA expressing plasmids useful for expression of fusion proteins. Purification of hybrid proteins containing the C-LYTA fragment at the amino terminus has been described (see Biotechnology 10:795-798, 1992). Within a preferred embodiment, a repeat portion of LYTA may be incorporated into a fusion polypeptide. A repeat portion is found in the C-terminal region starting at residue 178. A particularly preferred repeat portion incorporates residues 188-305.

[0093] Yet another illustrative embodiment involves fusion polypeptides, and the polynucleotides encoding them, wherein the fusion partner comprises a targeting signal capable of directing a polypeptide to the endosomal/lysosomal compartment, as described in U.S. Pat. No. 5,633,234. An immunogenic polypeptide of the invention, when fused with this targeting signal, will associate more efficiently with MHC class II molecules and thereby provide enhanced in vivo stimulation of CD4⁺ T-cells specific for the polypeptide.

[0094] Polypeptides of the invention are prepared using any of a variety of well known synthetic and/or recombinant techniques, the latter of which are further described below. Polypeptides, portions and other variants generally less than about 150 amino acids can be generated by synthetic means, using techniques well known to those of ordinary skill in the art. In one illustrative example, such polypeptides are synthesized using any of the commercially available solid-phase techniques, such as the Merrifield solid-phase synthesis method, where amino acids are sequentially added to a growing amino acid chain. See Merrifield, J. Am. Chem. Soc. 85:2149-2146,1963. Equipment for automated synthesis of polypeptides is commercially available from suppliers such as Perkin Elmer/Applied BioSystems Division (Foster City, Calif.), and may be operated according to the manufacturer's instructions.

[0095] In general, polypeptide compositions (including fusion polypeptides) of the invention are isolated. An “isolated” polypeptide is one that is removed from its original environment. For example, a naturally-occurring protein or polypeptide is isolated if it is separated from some or all of the coexisting materials in the natural system. Preferably, such polypeptides are also purified, e.g., are at least about 90% pure, more preferably at least about 95% pure and most preferably at least about 99% pure.

[0096] Polynucleotide Compositions

[0097] The present invention, in other aspects, provides polynucleotide compositions. The terms “DNA” and “polynucleotide” are used essentially interchangeably herein to refer to a DNA molecule that has been isolated free of total genomic DNA of a particular species. “Isolated,” as used herein, means that a polynucleotide is substantially away from other coding sequences, and that the DNA molecule does not contain large portions of unrelated coding DNA, such as large chromosomal fragments or other functional genes or polypeptide coding regions. Of course, this refers to the DNA molecule as originally isolated, and does not exclude genes or coding regions later added to the segment by the hand of man.

[0098] As will be understood by those skilled in the art, the polynucleotide compositions of this invention can include genomic sequences, extra-genomic and plasmid-encoded sequences and smaller engineered gene segments that express, or may be adapted to express, proteins, polypeptides, peptides and the like. Such segments may be naturally isolated, or modified synthetically by the hand of man.

[0099] As will be also recognized by the skilled artisan, polynucleotides of the invention may be single-stranded (coding or antisense) or double-stranded, and may be DNA (genomic, cDNA or synthetic) or RNA molecules. RNA molecules may include HnRNA molecules, which contain introns and correspond to a DNA molecule in a one-to-one manner, and mRNA molecules, which do not contain introns. Additional coding or non-coding sequences may, but need not, be present within a polynucleotide of the present invention, and a polynucleotide may, but need not, be linked to other molecules and/or support materials.

[0100] Polynucleotides may comprise a native sequence (i.e., an endogenous sequence that encodes a polypeptide/protein of the invention or a portion thereof) or may comprise a sequence that encodes a variant or derivative, preferably and immunogenic variant or derivative, of such a sequence.

[0101] Therefore, according to another aspect of the present invention, polynucleotide compositions are provided that comprise some or all of a polynucleotide sequence set forth in any one of SEQ ID NOs: 1-1559, complements of a polynucleotide sequence set forth in any one of SEQ ID NOs: 1-1559, and degenerate variants of a polynucleotide sequence set forth in any one of SEQ ID NOs: 1-1559. In certain preferred embodiments, the polynucleotide sequences set forth herein encode immunogenic polypeptides, as described above.

[0102] In other related embodiments, the present invention provides polynucleotide variants having substantial identity to the sequences disclosed herein in SEQ ID NOs: 1-1559, for example those comprising at least 70% sequence identity, preferably at least 75%, 80%, 85%, 90%, 95%, 96%, 97%, 98%, or 99% or higher, sequence identity compared to a polynucleotide sequence of this invention using the methods described herein, (e.g., BLAST analysis using standard parameters, as described below). One skilled in this art will recognize that these values can be appropriately adjusted to determine corresponding identity of proteins encoded by two nucleotide sequences by taking into account codon degeneracy, amino acid similarity, reading frame positioning and the like.

[0103] Typically, polynucleotide variants will contain one or more substitutions, additions, deletions and/or insertions, preferably such that the immunogenicity of the polypeptide encoded by the variant polynucleotide is not substantially diminished relative to a polypeptide encoded by a polynucleotide sequence specifically set forth herein). The term “variants” should also be understood to encompasses homologous genes of xenogenic origin.

[0104] In additional embodiments, the present invention provides polynucleotide fragments comprising or consisting of various lengths of contiguous stretches of sequence identical to or complementary to one or more of the sequences disclosed herein. For example, polynucleotides are provided by this invention that comprise or consist of at least about 10, 15, 20, 30, 40, 50, 75, 100, 150, 200, 300, 400, 500 or 1000 or more contiguous nucleotides of one or more of the sequences disclosed herein as well as all intermediate lengths there between. It will be readily understood that “intermediate lengths” , in this context, means any length between the quoted values, such as 16, 17, 18, 19, etc.; 21, 22, 23, etc.; 30, 31, 32, etc.; 50, 51, 52, 53, etc.; 100, 101, 102, 103, etc.; 150, 151, 152, 153, etc.; including all integers through 200-500; 500-1,000, and the like. A polynucleotide sequence as described here may be extended at one or both ends by additional nucleotides not found in the native sequence. This additional sequence may consist of 1, 2, 3, 4, 5, 6, 7, 8, 9, 10, 11, 12, 13, 14, 15, 16, 17, 18, 19, or 20 nucleotides at either end of the disclosed sequence or at both ends of the disclosed sequence.

[0105] In another embodiment of the invention, polynucleotide compositions are provided that are capable of hybridizing under moderate to high stringency conditions to a polynucleotide sequence provided herein, or a fragment thereof, or a complementary sequence thereof. Hybridization techniques are well known in the art of molecular biology. For purposes of illustration, suitable moderately stringent conditions for testing the hybridization of a polynucleotide of this invention with other polynucleotides include prewashing in a solution of 5×SSC, 0.5% SDS, 1.0 mM EDTA (pH 8.0); hybridizing at 50° C.-60° C., 5×SSC, overnight; followed by washing twice at 65° C. for 20 minutes with each of 2×, 0.5× and 0.2×SSC containing 0.1% SDS. One skilled in the art will understand that the stringency of hybridization can be readily manipulated, such as by altering the salt content of the hybridization solution and/or the temperature at which the hybridization is performed. For example, in another embodiment, suitable highly stringent hybridization conditions include those described above, with the exception that the temperature of hybridization is increased, e.g., to 60-65° C. or 65-70° C.

[0106] In certain preferred embodiments, the polynucleotides described above, e.g., polynucleotide variants, fragments and hybridizing sequences, encode polypeptides that are immunologically cross-reactive with a polypeptide sequence specifically set forth herein. In other preferred embodiments, such polynucleotides encode polypeptides that have a level of immunogenic activity of at least about 50%, preferably at least about 70%, and more preferably at least about 90% of that for a polypeptide sequence specifically set forth herein.

[0107] The polynucleotides of the present invention, or fragments thereof, regardless of the length of the coding sequence itself, may be combined with other DNA sequences, such as promoters, polyadenylation signals, additional restriction enzyme sites, multiple cloning sites, other coding segments, and the like, such that their overall length may vary considerably. It is therefore contemplated that a nucleic acid fragment of almost any length may be employed, with the total length preferably being limited by the ease of preparation and use in the intended recombinant DNA protocol. For example, illustrative polynucleotide segments with total lengths of about 10,000, about 5000, about 3000, about 2,000, about 1,000, about 500, about 200, about 100, about 50 base pairs in length, and the like, (including all intermediate lengths) are contemplated to be useful in many implementations of this invention.

[0108] When comparing polynucleotide sequences, two sequences are said to be “identical” if the sequence of nucleotides in the two sequences is the same when aligned for maximum correspondence, as described below. Comparisons between two sequences are typically performed by comparing the sequences over a comparison window to identify and compare local regions of sequence similarity. A “comparison window” as used herein, refers to a segment of at least about 20 contiguous positions, usually 30 to about 75, 40 to about 50, in which a sequence may be compared to a reference sequence of the same number of contiguous positions after the two sequences are optimally aligned.

[0109] Optimal alignment of sequences for comparison may be conducted using the Megalign program in the Lasergene suite of bioinformatics software (DNASTAR, Inc., Madison, Wis.), using default parameters. This program embodies several alignment schemes described in the following references: Dayhoff, M. O. (1978) A model of evolutionary change in proteins—Matrices for detecting distant relationships. In Dayhoff, M. O. (ed.) Atlas of Protein Sequence and Structure, National Biomedical Research Foundation, Washington D.C. Vol. 5, Suppl. 3, pp. 345-358; Hein J. (1990) Unified Approach to Alignment and Phylogenes pp. 626-645 Methods in Enzymology vol. 183, Academic Press, Inc., San Diego, Calif.; Higgins, D. G. and Sharp, P. M. (1989) CABIOS 5:151-153; Myers, E. W. and Muller W. (1988) CABIOS4:11-17; Robinson, E. D. (1971) Comb. Theor 11:105; Santou, N. Nes, M. (1987) Mol. Biol. Evol. 4:406-425; Sneath, P. H. A. and Sokal, R. R. (1973) Numerical Taxonomy—the Principles and Practice of Numerical Taxonomy, Freeman Press, San Francisco, Calif.; Wilbur, W. J. and Lipman, D. J. (1983) Proc. Natl. Acad., Sci. USA 80:726-730.

[0110] Alternatively, optimal alignment of sequences for comparison may be conducted by the local identity algorithm of Smith and Waterman (1981) Add. APL. Math 2:482, by the identity alignment algorithm of Needleman and Wunsch (1970) J. Mol. Biol. 48:443, by the search for similarity methods of Pearson and Lipman (1988) Proc. Natl. Acad. Sci. USA 85: 2444, by computerized implementations of these algorithms (GAP, BESTFIT, BLAST, FASTA, and TFASTA in the Wisconsin Genetics Software Package, Genetics Computer Group (GCG), 575 Science Dr., Madison, Wis.), or by inspection.

[0111] One preferred example of algorithms that are suitable for determining percent sequence identity and sequence similarity are the BLAST and BLAST 2.0 algorithms, which are described in Altschul et al. (1977) Nucl. Acids Res. 25:3389-3402 and Altschul et al. (1990) J. Mol. Biol. 215:403-410, respectively. BLAST and BLAST 2.0 can be used, for example with the parameters described herein, to determine percent sequence identity for the polynucleotides of the invention. Software for performing BLAST analyses is publicly available through the National Center for Biotechnology Information. In one illustrative example, cumulative scores can be calculated using, for nucleotide sequences, the parameters M (reward score for a pair of matching residues; always >0) and N (penalty score for mismatching residues; always <0). Extension of the word hits in each direction are halted when: the cumulative alignment score falls off by the quantity X from its maximum achieved value; the cumulative score goes to zero or below, due to the accumulation of one or more negative-scoring residue alignments; or the end of either sequence is reached. The BLAST algorithm parameters W, T and X determine the sensitivity and speed of the alignment. The BLASTN program (for nucleotide sequences) uses as defaults a wordlength (W) of 11, and expectation (E) of 10, and the BLOSUM62 scoring matrix (see Henikoff and Henikoff (1989) Proc. Natl. Acad. Sci. USA 89:10915) alignments, (B) of 50, expectation (E) of 10, M=5, N=−4 and a comparison of both strands.

[0112] Preferably, the “percentage of sequence identity” is determined by comparing two optimally aligned sequences over a window of comparison of at least 20 positions, wherein the portion of the polynucleotide sequence in the comparison window may comprise additions or deletions (i.e., gaps) of 20 percent or less, usually 5 to 15 percent, or 10 to 12 percent, as compared to the reference sequences (which does not comprise additions or deletions) for optimal alignment of the two sequences. The percentage is calculated by determining the number of positions at which the identical nucleic acid bases occurs in both sequences to yield the number of matched positions, dividing the number of matched positions by the total number of positions in the reference sequence (i.e., the window size) and multiplying the results by 100 to yield the percentage of sequence identity.

[0113] It will be appreciated by those of ordinary skill in the art that, as a result of the degeneracy of the genetic code, there are many nucleotide sequences that encode a polypeptide as described herein. Some of these polynucleotides bear minimal homology to the nucleotide sequence of any native gene. Nonetheless, polynucleotides that vary due to differences in codon usage are specifically contemplated by the present invention. Further, alleles of the genes comprising the polynucleotide sequences provided herein are within the scope of the present invention. Alleles are endogenous genes that are altered as a result of one or more mutations, such as deletions, additions and/or substitutions of nucleotides. The resulting mRNA and protein may, but need not, have an altered structure or function. Alleles may be identified using standard techniques (such as hybridization, amplification and/or database sequence comparison).

[0114] Therefore, in another embodiment of the invention, a mutagenesis approach, such as site-specific mutagenesis, is employed for the preparation of immunogenic variants and/or derivatives of the polypeptides described herein. By this approach, specific modifications in a polypeptide sequence can be made through mutagenesis of the underlying polynucleotides that encode them. These techniques provides a straightforward approach to prepare and test sequence variants, for example, incorporating one or more of the foregoing considerations, by introducing one or more nucleotide sequence changes into the polynucleotide.

[0115] Site-specific mutagenesis allows the production of mutants through the use of specific oligonucleotide sequences which encode the DNA sequence of the desired mutation, as well as a sufficient number of adjacent nucleotides, to provide a primer sequence of sufficient size and sequence complexity to form a stable duplex on both sides of the deletion junction being traversed. Mutations may be employed in a selected polynucleotide sequence to improve, alter, decrease, modify, or otherwise change the properties of the polynucleotide itself, and/or alter the properties, activity, composition, stability, or primary sequence of the encoded polypeptide.

[0116] In certain embodiments of the present invention, the inventors contemplate the mutagenesis of the disclosed polynucleotide sequences to alter one or more properties of the encoded polypeptide, such as the immunogenicity of a polypeptide vaccine. The techniques of site-specific mutagenesis are well-known in the art, and are widely used to create variants of both polypeptides and polynucleotides. For example, site-specific mutagenesis is often used to alter a specific portion of a DNA molecule. In such embodiments, a primer comprising typically about 14 to about 25 nucleotides or so in length is employed, with about 5 to about 10 residues on both sides of the junction of the sequence being altered.

[0117] As will be appreciated by those of skill in the art, site-specific mutagenesis techniques have often employed a phage vector that exists in both a single stranded and double stranded form. Typical vectors useful in site-directed mutagenesis include vectors such as the M13 phage. These phage are readily commercially-available and their use is generally well-known to those skilled in the art. Double-stranded plasmids are also routinely employed in site directed mutagenesis that eliminates the step of transferring the gene of interest from a plasmid to a phage.

[0118] In general, site-directed mutagenesis in accordance herewith is performed by first obtaining a single-stranded vector or melting apart of two strands of a double-stranded vector that includes within its sequence a DNA sequence that encodes the desired peptide. An oligonucleotide primer bearing the desired mutated sequence is prepared, generally synthetically. This primer is then annealed with the single-stranded vector, and subjected to DNA polymerizing enzymes such as E. coli polymerase I Klenow fragment, in order to complete the synthesis of the mutation-bearing strand. Thus, a heteroduplex is formed wherein one strand encodes the original non-mutated sequence and the second strand bears the desired mutation. This heteroduplex vector is then used to transform appropriate cells, such as E. coli cells, and clones are selected which include recombinant vectors bearing the mutated sequence arrangement.

[0119] The preparation of sequence variants of the selected peptide-encoding DNA segments using site-directed mutagenesis provides a means of producing potentially useful species and is not meant to be limiting as there are other ways in which sequence variants of peptides and the DNA sequences encoding them may be obtained. For example, recombinant vectors encoding the desired peptide sequence may be treated with mutagenic agents, such as hydroxylamine, to obtain sequence variants. Specific details regarding these methods and protocols are found in the teachings of Maloy et al., 1994; Segal, 1976; Prokop and Bajpai, 1991; Kuby, 1994; and Maniatis et al., 1982, each incorporated herein by reference, for that purpose.

[0120] As used herein, the term “oligonucleotide directed mutagenesis procedure” refers to template-dependent processes and vector-mediated propagation which result in an increase in the concentration of a specific nucleic acid molecule relative to its initial concentration, or in an increase in the concentration of a detectable signal, such as amplification. As used herein, the term “oligonucleotide directed mutagenesis procedure” is intended to refer to a process that involves the template-dependent extension of a primer molecule. The term template dependent process refers to nucleic acid synthesis of an RNA or a DNA molecule wherein the sequence of the newly synthesized strand of nucleic acid is dictated by the well-known rules of complementary base pairing (see, for example, Watson, 1987). Typically, vector mediated methodologies involve the introduction of the nucleic acid fragment into a DNA or RNA vector, the clonal amplification of the vector, and the recovery of the amplified nucleic acid fragment. Examples of such methodologies are provided by U.S. Pat. No. 4,237,224, specifically incorporated herein by reference in its entirety.

[0121] In another approach for the production of polypeptide variants of the present invention, recursive sequence recombination, as described in U.S. Pat. No. 5,837,458, may be employed. In this approach, iterative cycles of recombination and screening or selection are performed to “evolve” individual polynucleotide variants of the invention having, for example, enhanced immunogenic activity.

[0122] In other embodiments of the present invention, the polynucleotide sequences provided herein can be advantageously used as probes or primers for nucleic acid hybridization. As such, it is contemplated that nucleic acid segments that comprise or consist of a sequence region of at least about a 15 nucleotide long contiguous sequence that has the same sequence as, or is complementary to, a 15 nucleotide long contiguous sequence disclosed herein will find particular utility. Longer contiguous identical or complementary sequences, e.g., those of about 20, 30, 40, 50, 100, 200, 500, 1000 (including all intermediate lengths) and even up to full length sequences will also be of use in certain embodiments.

[0123] The ability of such nucleic acid probes to specifically hybridize to a sequence of interest will enable them to be of use in detecting the presence of complementary sequences in a given sample. However, other uses are also envisioned, such as the use of the sequence information for the preparation of mutant species primers, or primers for use in preparing other genetic constructions.

[0124] Polynucleotide molecules having sequence regions consisting of contiguous nucleotide stretches of 10-14, 15-20, 30, 50, or even of 100-200 nucleotides or so (including intermediate lengths as well), identical or complementary to a polynucleotide sequence disclosed herein, are particularly contemplated as hybridization probes for use in, e.g., Southern and Northern blotting. This would allow a gene product, or fragment thereof, to be analyzed, both in diverse cell types and also in various bacterial cells. The total size of fragment, as well as the size of the complementary stretch(es), will ultimately depend on the intended use or application of the particular nucleic acid segment. Smaller fragments will generally find use in hybridization embodiments, wherein the length of the contiguous complementary region may be varied, such as between about 15 and about 100 nucleotides, but larger contiguous complementarity stretches may be used, according to the length complementary sequences one wishes to detect.

[0125] The use of a hybridization probe of about 15-25 nucleotides in length allows the formation of a duplex molecule that is both stable and selective. Molecules having contiguous complementary sequences over stretches greater than 15 bases in length are generally preferred, though, in order to increase stability and selectivity of the hybrid, and thereby improve the quality and degree of specific hybrid molecules obtained. One will generally prefer to design nucleic acid molecules having gene-complementary stretches of 15 to 25 contiguous nucleotides, or even longer where desired.

[0126] Hybridization probes may be selected from any portion of any of the sequences disclosed herein. All that is required is to review the sequences set forth herein, or to any continuous portion of the sequences, from about 15-25 nucleotides in length up to and including the full length sequence, that one wishes to utilize as a probe or primer. The choice of probe and primer sequences may be governed by various factors. For example, one may wish to employ primers from towards the termini of the total sequence.

[0127] Small polynucleotide segments or fragments may be readily prepared by, for example, directly synthesizing the fragment by chemical means, as is commonly practiced using an automated oligonucleotide synthesizer. Also, fragments may be obtained by application of nucleic acid reproduction technology, such as the PCR™ technology of U.S. Pat. No. 4,683,202 (incorporated herein by reference), by introducing selected sequences into recombinant vectors for recombinant production, and by other recombinant DNA techniques generally known to those of skill in the art of molecular biology.

[0128] The nucleotide sequences of the invention may be used for their ability to selectively form duplex molecules with complementary stretches of the entire gene or gene fragments of interest. Depending on the application envisioned, one will typically desire to employ varying conditions of hybridization to achieve varying degrees of selectivity of probe towards target sequence. For applications requiring high selectivity, one will typically desire to employ relatively stringent conditions to form the hybrids, e.g., one will select relatively low salt and/or high temperature conditions, such as provided by a salt concentration of from about 0.02 M to about 0.15 M salt at temperatures of from about 50° C. to about 70° C. Such selective conditions tolerate little, if any, mismatch between the probe and the template or target strand, and would be particularly suitable for isolating related sequences.

[0129] Of course, for some applications, for example, where one desires to prepare mutants employing a mutant primer strand hybridized to an underlying template, less stringent (reduced stringency) hybridization conditions will typically be needed in order to allow formation of the heteroduplex. In these circumstances, one may desire to employ salt conditions such as those of from about 0.15 M to about 0.9 M salt, at temperatures ranging from about 20° C. to about 55° C. Cross-hybridizing species can thereby be readily identified as positively hybridizing signals with respect to control hybridizations. In any case, it is generally appreciated that conditions can be rendered more stringent by the addition of increasing amounts of formamide, which serves to destabilize the hybrid duplex in the same manner as increased temperature. Thus, hybridization conditions can be readily manipulated, and thus will generally be a method of choice depending on the desired results.

[0130] According to another embodiment of the present invention, polynucleotide compositions comprising antisense oligonucleotides are provided. Antisense oligonucleotides have been demonstrated to be effective and targeted inhibitors of protein synthesis, and, consequently, provide a therapeutic approach by which a disease can be treated by inhibiting the synthesis of proteins that contribute to the disease. The efficacy of antisense oligonucleotides for inhibiting protein synthesis is well established. For example, the synthesis of polygalactauronase and the muscarine type 2 acetylcholine receptor are inhibited by antisense oligonucleotides directed to their respective mRNA sequences (U.S. Pat. No. 5,739,119 and U.S. Pat. No. 5,759,829). Further, examples of antisense inhibition have been demonstrated with the nuclear protein cyclin, the multiple drug resistance gene (MDG1), ICAM-1, E-selectin, STK-1, striatal GABA_{A} receptor and human EGF (Jaskulski et al., Science. Jun. 10, 1988;240(4858):1544-6; Vasanthakumar and Ahmed, Cancer Commun. 1989; 1 (4):225-32; Peris et al., Brain Res Mol Brain Res. Jun. 15, 1998;57(2):310-20; U.S. Pat. No. 5,801,154; U.S. Pat. No. 5,789,573; U.S. Pat. No. 5,718,709 and U.S. Pat. No. 5,610,288). Antisense constructs have also been described that inhibit and can be used to treat a variety of abnormal cellular proliferations, e.g. cancer (U.S. Pat. No. 5,747,470; U.S. Pat. No. 5,591,317 and U.S. Pat. No. 5,783,683).

[0131] Therefore, in certain embodiments, the present invention provides oligonucleotide sequences that comprise all, or a portion of, any sequence that is capable of specifically binding to polynucleotide sequence described herein, or a complement thereof. In one embodiment, the antisense oligonucleotides comprise DNA or derivatives thereof. In another embodiment, the oligonucleotides comprise RNA or derivatives thereof. In a third embodiment, the oligonucleotides are modified DNAs comprising a phosphorothioated modified backbone. In a fourth embodiment, the oligonucleotide sequences comprise peptide nucleic acids or derivatives thereof. In each case, preferred compositions comprise a sequence region that is complementary, and more preferably substantially-complementary, and even more preferably, completely complementary to one or more portions of polynucleotides disclosed herein. Selection of antisense compositions specific for a given gene sequence is based upon analysis of the chosen target sequence and determination of secondary structure, Tₘ, binding energy, and relative stability. Antisense compositions may be selected based upon their relative inability to form dimers, hairpins, or other secondary structures that would reduce or prohibit specific binding to the target mRNA in a host cell. Highly preferred target regions of the mRNA, are those which are at or near the AUG translation initiation codon, and those sequences which are substantially complementary to 5′ regions of the mRNA. These secondary structure analyses and target site selection considerations can be performed, for example, using v.4 of the OLIGO primer analysis software and/or the BLASTN 2.0.5 algorithm software (Altschul et al., Nucleic Acids Res. 1997, 25(17):3389-402).

[0132] The use of an antisense delivery method employing a short peptide vector, termed MPG (27 residues), is also contemplated. The MPG peptide contains a hydrophobic domain derived from the fusion sequence of HIV gp41 and a hydrophilic domain from the nuclear localization sequence of SV40 T-antigen (Morris et al., Nucleic Acids Res. Jul. 15, 1997;25(14):2730-6). It has been demonstrated that several molecules of the MPG peptide coat the antisense oligonucleotides and can be delivered into cultured mammalian cells in less than 1 hour with relatively high efficiency (90%). Further, the interaction with MPG strongly increases both the stability of the oligonucleotide to nuclease and the ability to cross the plasma membrane.

[0133] According to another embodiment of the invention, the polynucleotide compositions described herein are used in the design and preparation of ribozyme molecules for inhibiting expression of the tumor polypeptides and proteins of the present invention in tumor cells. Ribozymes are RNA-protein complexes that cleave nucleic acids in a site-specific fashion. Ribozymes have specific catalytic domains that possess endonuclease activity (Kim and Cech, Proc Natl Acad Sci USA. December 1987;84(24):8788-92; Forster and Symons, Cell. Apr. 24, 1987;49(2):211-20). For example, a large number of ribozymes accelerate phosphoester transfer reactions with a high degree of specificity, often cleaving only one of several phosphoesters in an oligonucleotide substrate (Cech et al., Cell. December 1981;27(3 Pt 2):487-96; Michel and Westhof, J Mol Biol. Dec. 5, 1990;216(3):585-610; Reinhold-Hurek and Shub, Nature. May 14, 1992;357(6374):173-6). This specificity has been attributed to the requirement that the substrate bind via specific base-pairing interactions to the internal guide sequence (“IGS”) of the ribozyme prior to chemical reaction.

[0134] Six basic varieties of naturally-occurring enzymatic RNAs are known presently. Each can catalyze the hydrolysis of RNA phosphodiester bonds in trans (and thus can cleave other RNA molecules) under physiological conditions. In general, enzymatic nucleic acids act by first binding to a target RNA. Such binding occurs through the target binding portion of a enzymatic nucleic acid which is held in close proximity to an enzymatic portion of the molecule that acts to cleave the target RNA. Thus, the enzymatic nucleic acid first recognizes and then binds a target RNA through complementary base-pairing, and once bound to the correct site, acts enzymatically to cut the target RNA. Strategic cleavage of such a target RNA will destroy its ability to direct synthesis of an encoded protein. After an enzymatic nucleic acid has bound and cleaved its RNA target, it is released from that RNA to search for another target and can repeatedly bind and cleave new targets.

[0135] The enzymatic nature of a ribozyme is advantageous over many technologies, such as antisense technology (where a nucleic acid molecule simply binds to a nucleic acid target to block its translation) since the concentration of ribozyme necessary to affect a therapeutic treatment is lower than that of an antisense oligonucleotide. This advantage reflects the ability of the ribozyme to act enzymatically. Thus, a single ribozyme molecule is able to cleave many molecules of target RNA. In addition, the ribozyme is a highly specific inhibitor, with the specificity of inhibition depending not only on the base pairing mechanism of binding to the target RNA, but also on the mechanism of target RNA cleavage. Single mismatches, or base-substitutions, near the site of cleavage can completely eliminate catalytic activity of a ribozyme. Similar mismatches in antisense molecules do not prevent their action (Woolf et al., Proc Natl Acad Sci USA. Aug. 15, 1992;89(16):7305-9). Thus, the specificity of action of a ribozyme is greater than that of an antisense oligonucleotide binding the same RNA site.

[0136] The enzymatic nucleic acid molecule may be formed in a hammerhead, hairpin, a hepatitis 6 virus, group I intron or RNaseP RNA (in association with an RNA guide sequence) or Neurospora VS RNA motif. Examples of hammerhead motifs are described by Rossi et al. Nucleic Acids Res. Sep. 11, 1992;20(17):4559-65. Examples of hairpin motifs are described by Hampel et al. (Eur. Pat. Appl. Publ. No. EP 0360257), Hampel and Tritz, Biochemistry Jun. 13, 1989;28(12):4929-33; Hampel et al., Nucleic Acids Res. Jan. 25, 1990;18(2):299-304 and U.S. Pat. No. 5,631,359. An example of the hepatitis δ virus motif is described by Perrotta and Been, Biochemistry. Dec. 1, 1992;31(47):11843-52; an example of the RNaseP motif is described by Guerrier-Takada et al., Cell. December 1983;35(3 Pt 2):849-57; Neurospora VS RNA ribozyme motif is described by Collins (Saville and Collins, Cell. May 18, 1990;61(4):685-96; Saville and Collins, Proc Natl Acad Sci USA. Oct. 1, 1991;88(19):8826-30; Collins and Olive, Biochemistry. Mar. 23, 1993;32(11):2795-9); and an example of the Group I intron is described in (U.S. Pat. No. 4,987,071). All that is important in an enzymatic nucleic acid molecule of this invention is that it has a specific substrate binding site which is complementary to one or more of the target gene RNA regions, and that it have nucleotide sequences within or surrounding that substrate binding site which impart an RNA cleaving activity to the molecule. Thus the ribozyme constructs need not be limited to specific motifs mentioned herein.

[0137] Ribozymes may be designed as described in Int. Pat. Appl. Publ. No. WO 93/23569 and Int. Pat. Appl. Publ. No. WO 94/02595, each specifically incorporated herein by reference) and synthesized to be tested in vitro and in vivo, as described. Such ribozymes can also be optimized for delivery. While specific examples are provided, those in the art will recognize that equivalent RNA targets in other species can be utilized when necessary.

[0138] Ribozyme activity can be optimized by altering the length of the ribozyme binding arms, or chemically synthesizing ribozymes with modifications that prevent their degradation by serum ribonucleases (see e.g., Int. Pat. Appl. Publ. No. WO 92/07065; Int. Pat. Appl. Publ. No. WO 93/15187; Int. Pat. Appl. Publ. No. WO 91/03162; Eur. Pat. Appl. Publ. No. 92110298.4; U.S. Pat. No. 5,334,711; and Int. Pat. Appl. Publ. No. WO 94/13688, which describe various chemical modifications that can be made to the sugar moieties of enzymatic RNA molecules), modifications which enhance their efficacy in cells, and removal of stem II bases to shorten RNA synthesis times and reduce chemical requirements.

[0139] Sullivan et al. (Int. Pat. Appl. Publ. No. WO 94/02595) describes the general methods for delivery of enzymatic RNA molecules. Ribozymes may be administered to cells by a variety of methods known to those familiar to the art, including, but not restricted to, encapsulation in liposomes, by iontophoresis, or by incorporation into other vehicles, such as hydrogels, cyclodextrins, biodegradable nanocapsules, and bioadhesive microspheres. For some indications, ribozymes may be directly delivered ex vivo to cells or tissues with or without the aforementioned vehicles. Alternatively, the RNA/vehicle combination may be locally delivered by direct inhalation, by direct injection or by use of a catheter, infusion pump or stent. Other routes of delivery include, but are not limited to, intravascular, intramuscular, subcutaneous or joint injection, aerosol inhalation, oral (tablet or pill form), topical, systemic, ocular, intraperitoneal and/or intrathecal delivery. More detailed descriptions of ribozyme delivery and administration are provided in Int. Pat. Appl. Publ. No. WO 94/02595 and Int. Pat. Appl. Publ. No. WO 93/23569, each specifically incorporated herein by reference.

[0140] Another means of accumulating high concentrations of a ribozyme(s) within cells is to incorporate the ribozyme-encoding sequences into a DNA expression vector. Transcription of the ribozyme sequences are driven from a promoter for eukaryotic RNA polymerase I (pol I), RNA polymerase II (pol II), or RNA polymerase III (pol III). Transcripts from pol II or pol III promoters will be expressed at high levels in all cells; the levels of a given pol II promoter in a given cell type will depend on the nature of the gene regulatory sequences (enhancers, silencers, etc.) present nearby. Prokaryotic RNA polymerase promoters may also be used, providing that the prokaryotic RNA polymerase enzyme is expressed in the appropriate cells Ribozymes expressed from such promoters have been shown to function in mammalian cells. Such transcription units can be incorporated into a variety of vectors for introduction into mammalian cells, including but not restricted to, plasmid DNA vectors, viral DNA vectors (such as adenovirus or adeno-associated vectors), or viral RNA vectors (such as retroviral, semliki forest virus, sindbis virus vectors).

[0141] In another embodiment of the invention, peptide nucleic acids (PNAs) compositions are provided. PNA is a DNA mimic in which the nucleobases are attached to a pseudopeptide backbone (Good and Nielsen, Antisense Nucleic Acid Drug Dev. 1997 7(4) 431-37). PNA is able to be utilized in a number methods that traditionally have used RNA or DNA. Often PNA sequences perform better in techniques than the corresponding RNA or DNA sequences and have utilities that are not inherent to RNA or DNA. A review of PNA including methods of making, characteristics of, and methods of using, is provided by Corey (Trends Biotechnol June 1997;15(6):224-9). As such, in certain embodiments, one may prepare PNA sequences that are complementary to one or more portions of the ACE mRNA sequence, and such PNA compositions may be used to regulate, alter, decrease, or reduce the translation of ACE-specific mRNA, and thereby alter the level of ACE activity in a host cell to which such PNA compositions have been administered.

[0142] PNAs have 2-aminoethyl-glycine linkages replacing the normal phosphodiester backbone of DNA (Nielsen et al., Science Dec. 6, 1991;254(5037):1497-500; Hanvey et al., Science. Nov. 27, 1992;258(5087):1481-5; Hyrup and Nielsen, Bioorg Med Chem. January 1996;4(1):5-23). This chemistry has three important consequences: firstly, in contrast to DNA or phosphorothioate oligonucleotides, PNAs are neutral molecules; secondly, PNAs are achiral, which avoids the need to develop a stereoselective synthesis; and thirdly, PNA synthesis uses standard Boc or Fmoc protocols for solid-phase peptide synthesis, although other methods, including a modified Merrifield method, have been used.

[0143] PNA monomers or ready-made oligomers are commercially available from PerSeptive Biosystems (Framingham, Mass.). PNA syntheses by either Boc or Fmoc protocols are straightforward using manual or automated protocols (Norton et al., Bioorg Med Chem. April 1995;3(4):437-45). The manual protocol lends itself to the production of chemically modified PNAs or the simultaneous synthesis of families of closely related PNAs.

[0144] As with peptide synthesis, the success of a particular PNA synthesis will depend on the properties of the chosen sequence. For example, while in theory PNAs can incorporate any combination of nucleotide bases, the presence of adjacent purines can lead to deletions of one or more residues in the product. In expectation of this difficulty, it is suggested that, in producing PNAs with adjacent purines, one should repeat the coupling of residues likely to be added inefficiently. This should be followed by the purification of PNAs by reverse-phase high-pressure liquid chromatography, providing yields and purity of product similar to those observed during the synthesis of peptides.

[0145] Modifications of PNAs for a given application may be accomplished by coupling amino acids during solid-phase synthesis or by attaching compounds that contain a carboxylic acid group to the exposed N-terminal amine. Alternatively, PNAs can be modified after synthesis by coupling to an introduced lysine or cysteine. The ease with which PNAs can be modified facilitates optimization for better solubility or for specific functional requirements. Once synthesized, the identity of PNAs and their derivatives can be confirmed by mass spectrometry. Several studies have made and utilized modifications of PNAs (for example, Norton et al., Bioorg Med Chem. April 1995;3(4):437-45; Petersen et al., J Pept Sci. May-June 1995;1(3):175-83; Orum et al., Biotechniques. September 1995;19(3):472-80; Footer et al., Biochemistry. Aug. 20, 1996;35(33):10673-9; Griffith et al., Nucleic Acids Res. Aug. 11, 1995;23(15):3003-8; Pardridge et al., Proc Natl Acad Sci USA. Jun. 6, 1995;92(12):5592-6; Boffa et al., Proc Natl Acad Sci USA. Mar. 14, 1995;92(6):1901-5; Gambacorti-Passerini et al., Blood. Aug. 15, 1996;88(4):1411-7; Armitage et al., Proc Natl Acad Sci USA. Nov. 11, 1997;94(23): 12320-5; Seeger et al., Biotechniques. September 1997;23(3):512-7). U.S. Pat. No. 5,700,922 discusses PNA-DNA-PNA chimeric molecules and their uses in diagnostics, modulating protein in organisms, and treatment of conditions susceptible to therapeutics.

[0146] Methods of characterizing the antisense binding properties of PNAs are discussed in Rose (Anal Chem. Dec. 15, 1993;65(24):3545-9) and Jensen et al. (Biochemistry. Apr. 22, 1997;36(16):5072-7). Rose uses capillary gel electrophoresis to determine binding of PNAs to their complementary oligonucleotide, measuring the relative binding kinetics and stoichiometry. Similar types of measurements were made by Jensen et al. using BIAcore™ technology.

[0147] Other applications of PNAs that have been described and will be apparent to the skilled artisan include use in DNA strand invasion, antisense inhibition, mutational analysis, enhancers of transcription, nucleic acid purification, isolation of transcriptionally active genes, blocking of transcription factor binding, genome cleavage, biosensors, in situ hybridization, and the like.

[0148] Polynucleotide Identification, Characterization and Expression

[0149] Polynucleotides compositions of the present invention may be identified, prepared and/or manipulated using any of a variety of well established techniques (see generally, Sambrook et al., Molecular Cloning: A Laboratory Manual, Cold Spring Harbor Laboratories, Cold Spring Harbor, N.Y., 1989, and other like references). For example, a polynucleotide may be identified, as described in more detail below, by screening a microarray of cDNAs for tumor-associated expression (i.e., expression that is at least two fold greater in a tumor than in normal tissue, as determined using a representative assay provided herein). Such screens may be performed, for example, using the microarray technology of Affymetrix, Inc. (Santa Clara, Calif.) according to the manufacturer's instructions (and essentially as described by Schena et al., Proc. Natl. Acad. Sci. USA 93:10614-10619,1996 and Heller et al., Proc. Natl. Acad. Sci. USA 94:2150-2155, 1997). Alternatively, polynucleotides may be amplified from cDNA prepared from cells expressing the proteins described herein, such as tumor cells.

[0150] Many template dependent processes are available to amplify a target sequences of interest present in a sample. One of the best known amplification methods is the polymerase chain reaction (PCR™) which is described in detail in U.S. Pat. Nos. 4,683,195, 4,683,202 and 4,800,159, each of which is incorporated herein by reference in its entirety. Briefly, in PCR™, two primer sequences are prepared which are complementary to regions on opposite complementary strands of the target sequence. An excess of deoxynucleoside triphosphates is added to a reaction mixture along with a DNA polymerase (e.g., Taq polymerase). If the target sequence is present in a sample, the primers will bind to the target and the polymerase will cause the primers to be extended along the target sequence by adding on nucleotides. By raising and lowering the temperature of the reaction mixture, the extended primers will dissociate from the target to form reaction products, excess primers will bind to the target and to the reaction product and the process is repeated. Preferably reverse transcription and PCR™ amplification procedure may be performed in order to quantify the amount of mRNA amplified. Polymerase chain reaction methodologies are well known in the art.

[0151] Any of a number of other template dependent processes, many of which are variations of the PCR™ amplification technique, are readily known and available in the art. Illustratively, some such methods include the ligase chain reaction (referred to as LCR), described, for example, in Eur. Pat. Appl. Publ. No. 320,308 and U.S. Pat. No. 4,883,750; Qbeta Replicase, described in PCT Intl. Pat. Appl. Publ. No. PCT/US87/00880; Strand Displacement Amplification (SDA) and Repair Chain Reaction (RCR). Still other amplification methods are described in Great Britain Pat. Appl. No. 2 202 328, and in PCT Intl. Pat. Appl. Publ. No. PCT/US89/01025. Other nucleic acid amplification procedures include transcription-based amplification systems (TAS) (PCT Intl. Pat. Appl. Publ. No. WO 88/10315), including nucleic acid sequence based amplification (NASBA) and 3SR. Eur. Pat. Appl. Publ. No. 329,822 describes a nucleic acid amplification process involving cyclically synthesizing single-stranded RNA (“ssRNA”), ssDNA, and double-stranded DNA (dsDNA). PCT Intl. Pat. Appl. Publ. No. WO 89/06700 describes a nucleic acid sequence amplification scheme based on the hybridization of a promoter/primer sequence to a target single-stranded DNA (“ssDNA”) followed by transcription of many RNA copies of the sequence. Other amplification methods such as “RACE” (Frohman, 1990), and “one-sided PCR” (Ohara, 1989) are also well-known to those of skill in the art.

[0152] An amplified portion of a polynucleotide of the present invention may be used to isolate a full length gene from a suitable library (e.g., a tumor cDNA library) using well known techniques. Within such techniques, a library (cDNA or genomic) is screened using one or more polynucleotide probes or primers suitable for amplification. Preferably, a library is size-selected to include larger molecules. Random primed libraries may also be preferred for identifying 5′ and upstream regions of genes. Genomic libraries are preferred for obtaining introns and extending 5′ sequences.

[0153] For hybridization techniques, a partial sequence may be labeled (e.g., by nick-translation or end-labeling with ³²P) using well known techniques. A bacterial or bacteriophage library is then generally screened by hybridizing filters containing denatured bacterial colonies (or lawns containing phage plaques) with the labeled probe (see Sambrook et al., Molecular Cloning: A Laboratory Manual, Cold Spring Harbor Laboratories, Cold Spring Harbor, N.Y., 1989). Hybridizing colonies or plaques are selected and expanded, and the DNA is isolated for further analysis. cDNA clones may be analyzed to determine the amount of additional sequence by, for example, PCR using a primer from the partial sequence and a primer from the vector. Restriction maps and partial sequences may be generated to identify one or more overlapping clones. The complete sequence may then be determined using standard techniques, which may involve generating a series of deletion clones. The resulting overlapping sequences can then assembled into a single contiguous sequence. A full length cDNA molecule can be generated by ligating suitable fragments, using well known techniques.

[0154] Alternatively, amplification techniques, such as those described above, can be useful for obtaining a full length coding sequence from a partial cDNA sequence. One such amplification technique is inverse PCR (see Triglia et al., Nucl. Acids Res. 16:8186, 1988), which uses restriction enzymes to generate a fragment in the known region of the gene. The fragment is then circularized by intramolecular ligation and used as a template for PCR with divergent primers derived from the known region. Within an alternative approach, sequences adjacent to a partial sequence may be retrieved by amplification with a primer to a linker sequence and a primer specific to a known region. The amplified sequences are typically subjected to a second round of amplification with the same linker primer and a second primer specific to the known region. A variation on this procedure, which employs two primers that initiate extension in opposite directions from the known sequence, is described in WO 96/38591. Another such technique is known as “rapid amplification of cDNA ends” or RACE. This technique involves the use of an internal primer and an external primer, which hybridizes to a polyA region or vector sequence, to identify sequences that are 5′ and 3′ of a known sequence. Additional techniques include capture PCR (Lagerstrom et al., PCR Methods Applic. 1:111-19, 1991) and walking PCR (Parker et al., Nucl. Acids. Res. 19:3055-60, 1991). Other methods employing amplification may also be employed to obtain a full length cDNA sequence.

[0155] In certain instances, it is possible to obtain a full length cDNA sequence by analysis of sequences provided in an expressed sequence tag (EST) database, such as that available from GenBank. Searches for overlapping ESTs may generally be performed using well known programs (e.g., NCBI BLAST searches), and such ESTs may be used to generate a contiguous full length sequence. Full length DNA sequences may also be obtained by analysis of genomic fragments.

[0156] In other embodiments of the invention, polynucleotide sequences or fragments thereof which encode polypeptides of the invention, or fusion proteins or functional equivalents thereof, may be used in recombinant DNA molecules to direct expression of a polypeptide in appropriate host cells. Due to the inherent degeneracy of the genetic code, other DNA sequences that encode substantially the same or a functionally equivalent amino acid sequence may be produced and these sequences may be used to clone and express a given polypeptide.

[0157] As will be understood by those of skill in the art, it may be advantageous in some instances to produce polypeptide-encoding nucleotide sequences possessing non-naturally occurring codons. For example, codons preferred by a particular prokaryotic or eukaryotic host can be selected to increase the rate of protein expression or to produce a recombinant RNA transcript having desirable properties, such as a half-life which is longer than that of a transcript generated from the naturally occurring sequence.

[0158] Moreover, the polynucleotide sequences of the present invention can be engineered using methods generally known in the art in order to alter polypeptide encoding sequences for a variety of reasons, including but not limited to, alterations which modify the cloning, processing, and/or expression of the gene product. For example, DNA shuffling by random fragmentation and PCR reassembly of gene fragments and synthetic oligonucleotides may be used to engineer the nucleotide sequences. In addition, site-directed mutagenesis may be used to insert new restriction sites, alter glycosylation patterns, change codon preference, produce splice variants, or introduce mutations, and so forth.

[0159] In another embodiment of the invention, natural, modified, or recombinant nucleic acid sequences may be ligated to a heterologous sequence to encode a fusion protein. For example, to screen peptide libraries for inhibitors of polypeptide activity, it may be useful to encode a chimeric protein that can be recognized by a commercially available antibody. A fusion protein may also be engineered to contain a cleavage site located between the polypeptide-encoding sequence and the heterologous protein sequence, so that the polypeptide may be cleaved and purified away from the heterologous moiety.

[0160] Sequences encoding a desired polypeptide may be synthesized, in whole or in part, using chemical methods well known in the art (see Caruthers, M. H. et al. (1980) Nucl. Acids Res. Symp. Ser. 215-223, Horn, T. et al. (1980) Nucl. Acids Res. Symp. Ser. 225-232). Alternatively, the protein itself may be produced using chemical methods to synthesize the amino acid sequence of a polypeptide, or a portion thereof. For example, peptide synthesis can be performed using various solid-phase techniques (Roberge, J. Y. et al. (1995) Science 269:202-204) and automated synthesis may be achieved, for example, using the ABI 431A Peptide Synthesizer (Perkin Elmer, Palo Alto, Calif.).

[0161] A newly synthesized peptide may be substantially purified by preparative high performance liquid chromatography (e.g., Creighton, T. (1983) Proteins, Structures and Molecular Principles, WH Freeman and Co., New York, N.Y.) or other comparable techniques available in the art. The composition of the synthetic peptides may be confirmed by amino acid analysis or sequencing (e.g., the Edman degradation procedure). Additionally, the amino acid sequence of a polypeptide, or any part thereof, may be altered during direct synthesis and/or combined using chemical methods with sequences from other proteins, or any part thereof, to produce a variant polypeptide.

[0162] In order to express a desired polypeptide, the nucleotide sequences encoding the polypeptide, or functional equivalents, may be inserted into appropriate expression vector, i.e., a vector which contains the necessary elements for the transcription and translation of the inserted coding sequence. Methods which are well known to those skilled in the art may be used to construct expression vectors containing sequences encoding a polypeptide of interest and appropriate transcriptional and translational control elements. These methods include in vitro recombinant DNA techniques, synthetic techniques, and in vivo genetic recombination. Such techniques are described, for example, in Sambrook, J. et al. (1989) Molecular Cloning, A Laboratory Manual, Cold Spring Harbor Press, Plainview, N.Y., and Ausubel, F. M. et al. (1989) Current Protocols in Molecular Biology, John Wiley & Sons, New York. N.Y.

[0163] A variety of expression vector/host systems may be utilized to contain and express polynucleotide sequences. These include, but are not limited to, microorganisms such as bacteria transformed with recombinant bacteriophage, plasmid, or cosmid DNA expression vectors; yeast transformed with yeast expression vectors; insect cell systems infected with virus expression vectors (e.g., baculovirus); plant cell systems transformed with virus expression vectors (e.g., cauliflower mosaic virus, CaMV; tobacco mosaic virus, TMV) or with bacterial expression vectors (e.g., Ti or pBR322 plasmids); or animal cell systems.

[0164] The “control elements” or “regulatory sequences” present in an expression vector are those non-translated regions of the vector—enhancers, promoters, 5′ and 3′ untranslated regions—which interact with host cellular proteins to carry out transcription and translation. Such elements may vary in their strength and specificity. Depending on the vector system and host utilized, any number of suitable transcription and translation elements, including constitutive and inducible promoters, may be used. For example, when cloning in bacterial systems, inducible promoters such as the hybrid lacZ promoter of the pBLUESCRIPT phagemid (Stratagene, La Jolla, Calif.) or pSPORT1 plasmid (Gibco BRL, Gaithersburg, Md.) and the like may be used. In mammalian cell systems, promoters from mammalian genes or from mammalian viruses are generally preferred. If it is necessary to generate a cell line that contains multiple copies of the sequence encoding a polypeptide, vectors based on SV40 or EBV may be advantageously used with an appropriate selectable marker.

[0165] In bacterial systems, any of a number of expression vectors may be selected depending upon the use intended for the expressed polypeptide. For example, when large quantities are needed, for example for the induction of antibodies, vectors which direct high level expression of fusion proteins that are readily purified may be used. Such vectors include, but are not limited to, the multifunctional E. coli cloning and expression vectors such as pBLUESCRIPT (Stratagene), in which the sequence encoding the polypeptide of interest may be ligated into the vector in frame with sequences for the amino-terminal Met and the subsequent 7 residues of beta.-galactosidase so that a hybrid protein is produced; pIN vectors (Van Heeke, G. and S. M. Schuster (1989) J. Biol. Chem. 264:5503-5509); and the like. pGEX Vectors (Promega, Madison, Wis.) may also be used to express foreign polypeptides as fusion proteins with glutathione S-transferase (GST). In general, such fusion proteins are soluble and can easily be purified from lysed cells by adsorption to glutathione-agarose beads followed by elution in the presence of free glutathione. Proteins made in such systems may be designed to include heparin, thrombin, or factor XA protease cleavage sites so that the cloned polypeptide of interest can be released from the GST moiety at will.

[0166] In the yeast, Saccharomyces cerevisiae, a number of vectors containing constitutive or inducible promoters such as alpha factor, alcohol oxidase, and PGH may be used. For reviews, see Ausubel et al. (supra) and Grant et al. (1987) Methods Enzymol. 153:516-544.

[0167] In cases where plant expression vectors are used, the expression of sequences encoding polypeptides may be driven by any of a number of promoters. For example, viral promoters such as the 35S and 19S promoters of CaMV may be used alone or in combination with the omega leader sequence from TMV (Takamatsu, N. (1987) EMBO J. 6:307-311. Alternatively, plant promoters such as the small subunit of RUBISCO or heat shock promoters may be used (Coruzzi, G. et al. (1984) EMBO J. 3:1671-1680; Broglie, R. et al. (1984) Science 224:838-843; and Winter, J. et al. (1991) Results Probl. Cell Differ. 17:85-105). These constructs can be introduced into plant cells by direct DNA transformation or pathogen-mediated transfection. Such techniques are described in a number of generally available reviews (see, for example, Hobbs, S. or Murry, L. E. in McGraw Hill Yearbook of Science and Technology (1992) McGraw Hill, New York, N.Y.; pp. 191-196).

[0168] An insect system may also be used to express a polypeptide of interest. For example, in one such system, Autographa californica nuclear polyhedrosis virus (AcNPV) is used as a vector to express foreign genes in Spodoptera frugiperda cells or in Trichoplusia larvae. The sequences encoding the polypeptide may be cloned into a non-essential region of the virus, such as the polyhedrin gene, and placed under control of the polyhedrin promoter. Successful insertion of the polypeptide-encoding sequence will render the polyhedrin gene inactive and produce recombinant virus lacking coat protein. The recombinant viruses may then be used to infect, for example, S. frugiperda cells or Trichoplusia larvae in which the polypeptide of interest may be expressed (Engelhard, E. K. et al. (1994) Proc. Natl. Acad. Sci. 91 :3224-3227).

[0169] In mammalian host cells, a number of viral-based expression systems are generally available. For example, in cases where an adenovirus is used as an expression vector, sequences encoding a polypeptide of interest may be ligated into an adenovirus transcription/translation complex consisting of the late promoter and tripartite leader sequence. Insertion in a non-essential E1 or E3 region of the viral genome may be used to obtain a viable virus which is capable of expressing the polypeptide in infected host cells (Logan, J. and Shenk, T. (1984) Proc. Natl. Acad. Sci. 81:3655-3659). In addition, transcription enhancers, such as the Rous sarcoma virus (RSV) enhancer, may be used to increase expression in mammalian host cells.

[0170] Specific initiation signals may also be used to achieve more efficient translation of sequences encoding a polypeptide of interest. Such signals include the ATG initiation codon and adjacent sequences. In cases where sequences encoding the polypeptide, its initiation codon, and upstream sequences are inserted into the appropriate expression vector, no additional transcriptional or translational control signals may be needed. However, in cases where only coding sequence, or a portion thereof, is inserted, exogenous translational control signals including the ATG initiation codon should be provided. Furthermore, the initiation codon should be in the correct reading frame to ensure translation of the entire insert. Exogenous translational elements and initiation codons may be of various origins, both natural and synthetic. The efficiency of expression may be enhanced by the inclusion of enhancers which are appropriate for the particular cell system which is used, such as those described in the literature (Scharf, D. et al. (1994) Results Probl. Cell Differ. 20:125-162).

[0171] In addition, a host cell strain may be chosen for its ability to modulate the expression of the inserted sequences or to process the expressed protein in the desired fashion. Such modifications of the polypeptide include, but are not limited to, acetylation, carboxylation, glycosylation, phosphorylation, lipidation, and acylation. Post-translational processing which cleaves a “prepro” form of the protein may also be used to facilitate correct insertion, folding and/or function. Different host cells such as CHO, COS, HeLa, MDCK, HEK293, and WI38, which have specific cellular machinery and characteristic mechanisms for such post-translational activities, may be chosen to ensure the correct modification and processing of the foreign protein.

[0172] For long-term, high-yield production of recombinant proteins, stable expression is generally preferred. For example, cell lines which stably express a polynucleotide of interest may be transformed using expression vectors which may contain viral origins of replication and/or endogenous expression elements and a selectable marker gene on the same or on a separate vector. Following the introduction of the vector, cells may be allowed to grow for 1-2 days in an enriched media before they are switched to selective media. The purpose of the selectable marker is to confer resistance to selection, and its presence allows growth and recovery of cells which successfully express the introduced sequences. Resistant clones of stably transformed cells may be proliferated using tissue culture techniques appropriate to the cell type.

[0173] Any number of selection systems may be used to recover transformed cell lines. These include, but are not limited to, the herpes simplex virus thymidine kinase (Wigler, M. et al. (1977) Cell 11:223-32) and adenine phosphoribosyltransferase (Lowy, I. et al. (1990) Cell 22:817-23) genes which can be employed in tk.sup.- or aprt.sup.-cells, respectively. Also, antimetabolite, antibiotic or herbicide resistance can be used as the basis for selection; for example, dhfr which confers resistance to methotrexate (Wigler, M. et al. (1980) Proc. Natl. Acad. Sci. 77:3567-70); npt, which confers resistance to the aminoglycosides, neomycin and G-418 (Colbere-Garapin, F. et al (1981) J. Mol. Biol. 150:1-14); and als or pat, which confer resistance to chlorsulfuron and phosphinotricin acetyltransferase, respectively (Murry, supra). Additional selectable genes have been described, for example, trpB, which allows cells to utilize indole in place of tryptophan, or hisD, which allows cells to utilize histinol in place of histidine (Hartman, S. C. and R. C. Mulligan (1988) Proc. Natl. Acad. Sci. 85:8047-51). The use of visible markers has gained popularity with such markers as anthocyanins, beta-glucuronidase and its substrate GUS, and luciferase and its substrate luciferin, being widely used not only to identify transformants, but also to quantify the amount of transient or stable protein expression attributable to a specific vector system (Rhodes, C. A. et al. (1995) Methods Mol. Biol. 55:121-131).

[0174] Although the presence/absence of marker gene expression suggests that the gene of interest is also present, its presence and expression may need to be confirmed. For example, if the sequence encoding a polypeptide is inserted within a marker gene sequence, recombinant cells containing sequences can be identified by the absence of marker gene function. Alternatively, a marker gene can be placed in tandem with a polypeptide-encoding sequence under the control of a single promoter. Expression of the marker gene in response to induction or selection usually indicates expression of the tandem gene as well.

[0175] Alternatively, host cells that contain and express a desired polynucleotide sequence may be identified by a variety of procedures known to those of skill in the art. These procedures include, but are not limited to, DNA-DNA or DNA-RNA hybridizations and protein bioassay or immunoassay techniques which include, for example, membrane, solution, or chip based technologies for the detection and/or quantification of nucleic acid or protein.

[0176] A variety of protocols for detecting and measuring the expression of polynucleotide-encoded products, using either polyclonal or monoclonal antibodies specific for the product are known in the art. Examples include enzyme-linked immunosorbent assay (ELISA), radioimmunoassay (RIA), and fluorescence activated cell sorting (FACS). A two-site, monoclonal-based immunoassay utilizing monoclonal antibodies reactive to two non-interfering epitopes on a given polypeptide may be preferred for some applications, but a competitive binding assay may also be employed. These and other assays are described, among other places, in Hampton, R. et al. (1990; Serological Methods, a Laboratory Manual, APS Press, St Paul. Minn.) and Maddox, D. E. et al. (1983; J. Exp. Med. 158:1211-1216).

[0177] A wide variety of labels and conjugation techniques are known by those skilled in the art and may be used in various nucleic acid and amino acid assays. Means for producing labeled hybridization or PCR probes for detecting sequences related to polynucleotides include oligolabeling, nick translation, end-labeling or PCR amplification using a labeled nucleotide. Alternatively, the sequences, or any portions thereof may be cloned into a vector for the production of an mRNA probe. Such vectors are known in the art, are commercially available, and may be used to synthesize RNA probes in vitro by addition of an appropriate RNA polymerase such as T7, T3, or SP6 and labeled nucleotides. These procedures may be conducted using a variety of commercially available kits. Suitable reporter molecules or labels, which may be used include radionuclides, enzymes, fluorescent, chemiluminescent, or chromogenic agents as well as substrates, cofactors, inhibitors, magnetic particles, and the like.

[0178] Host cells transformed with a polynucleotide sequence of interest may be cultured under conditions suitable for the expression and recovery of the protein from cell culture. The protein produced by a recombinant cell may be secreted or contained intracellularly depending on the sequence and/or the vector used. As will be understood by those of skill in the art, expression vectors containing polynucleotides of the invention may be designed to contain signal sequences which direct secretion of the encoded polypeptide through a prokaryotic or eukaryotic cell membrane. Other recombinant constructions may be used to join sequences encoding a polypeptide of interest to nucleotide sequence encoding a polypeptide domain which will facilitate purification of soluble proteins. Such purification facilitating domains include, but are not limited to, metal chelating peptides such as histidine-tryptophan modules that allow purification on immobilized metals, protein A domains that allow purification on immobilized immunoglobulin, and the domain utilized in the FLAGS extension/affinity purification system (Immunex Corp., Seattle, Wash.). The inclusion of cleavable linker sequences such as those specific for Factor XA or enterokinase (Invitrogen. San Diego, Calif.) between the purification domain and the encoded polypeptide may be used to facilitate purification. One such expression vector provides for expression of a fusion protein containing a polypeptide of interest and a nucleic acid encoding 6 histidine residues preceding a thioredoxin or an enterokinase cleavage site. The histidine residues facilitate purification on IMIAC (immobilized metal ion affinity chromatography) as described in Porath, J. et al. (1992, Prot. Exp. Purif. 3:263-281) while the enterokinase cleavage site provides a means for purifying the desired polypeptide from the fusion protein. A discussion of vectors which contain fusion proteins is provided in Kroll, D. J. et al. (1993; DNA Cell Biol. 12:441-453).

[0179] In addition to recombinant production methods, polypeptides of the invention, and fragments thereof, may be produced by direct peptide synthesis using solid-phase techniques (Merrifield J. (1963) J. Am. Chem. Soc. 85:2149-2154). Protein synthesis may be performed using manual techniques or by automation. Automated synthesis may be achieved, for example, using Applied Biosystems 431A Peptide Synthesizer (Perkin Elmer). Alternatively, various fragments may be chemically synthesized separately and combined using chemical methods to produce the full length molecule.

[0180] Antibody Compositions, Fragments Thereof and Other Binding Agents

[0181] According to another aspect, the present invention further provides binding agents, such as antibodies and antigen-binding fragments thereof, that exhibit immunological binding to a tumor polypeptide disclosed herein, or to a portion, variant or derivative thereof. An antibody, or antigen-binding fragment thereof, is said to “specifically bind,” “immunogically bind,” and/or is “immunologically reactive” to a polypeptide of the invention if it reacts at a detectable level (within, for example, an ELISA assay) with the polypeptide, and does not react detectably with unrelated polypeptides under similar conditions.

[0182] Immunological binding, as used in this context, generally refers to the non-covalent interactions of the type which occur between an immunoglobulin molecule and an antigen for which the immunoglobulin is specific. The strength, or affinity of immunological binding interactions can be expressed in terms of the dissociation constant (K_{d}) of the interaction, wherein a smaller K_{d} represents a greater affinity. Immunological binding properties of selected polypeptides can be quantified using methods well known in the art. One such method entails measuring the rates of antigen-binding site/antigen complex formation and dissociation, wherein those rates depend on the concentrations of the complex partners, the affinity of the interaction, and on geometric parameters that equally influence the rate in both directions. Thus, both the “on rate constant” (Kₒₙ) and the “off rate constant” (K_{off}) can be determined by calculation of the concentrations and the actual rates of association and dissociation. The ratio of K_{off}/Kₒₙ enables cancellation of all parameters not related to affinity, and is thus equal to the dissociation constant K_{d}. See, generally, Davies et al. (1990) Annual Rev. Biochem. 59:439-473.

[0183] An “antigen-binding site,” or “binding portion” of an antibody refers to the part of the immunoglobulin molecule that participates in antigen binding. The antigen binding site is formed by amino acid residues of the N-terminal variable (“V”) regions of the heavy (“H”) and light (“L”) chains. Three highly divergent stretches within the V regions of the heavy and light chains are referred to as “hypervariable regions” which are interposed between more conserved flanking stretches known as “framework regions,” or “FRs”. Thus the term “FR” refers to amino acid sequences which are naturally found between and adjacent to hypervariable regions in immunoglobulins. In an antibody molecule, the three hypervariable regions of a light chain and the three hypervariable regions of a heavy chain are disposed relative to each other in three dimensional space to form an antigen-binding surface. The antigen-binding surface is complementary to the three-dimensional surface of a bound antigen, and the three hypervariable regions of each of the heavy and light chains are referred to as “complementarity-determining regions,” or “CDRs.”

[0184] Binding agents may be further capable of differentiating between patients with and without a cancer, such as colon cancer, using the representative assays provided herein. For example, antibodies or other binding agents that bind to a tumor protein will preferably generate a signal indicating the presence of a cancer in at least about 20% of patients with the disease, more preferably at least about 30% of patients. Alternatively, or in addition, the antibody will generate a negative signal indicating the absence of the disease in at least about 90% of individuals without the cancer. To determine whether a binding agent satisfies this requirement, biological samples (e.g., blood, sera, sputum, urine and/or tumor biopsies) from patients with and without a cancer (as determined using standard clinical tests) may be assayed as described herein for the presence of polypeptides that bind to the binding agent. Preferably, a statistically significant number of samples with and without the disease will be assayed. Each binding agent should satisfy the above criteria; however, those of ordinary skill in the art will recognize that binding agents may be used in combination to improve sensitivity.

[0185] Any agent that satisfies the above requirements may be a binding agent. For example, a binding agent may be a ribosome, with or without a peptide component, an RNA molecule or a polypeptide. In a preferred embodiment, a binding agent is an antibody or an antigen-binding fragment thereof. Antibodies may be prepared by any of a variety of techniques known to those of ordinary skill in the art. See, e.g., Harlow and Lane, Antibodies, A Laboratory Manual, Cold Spring Harbor Laboratory, 1988. In general, antibodies can be produced by cell culture techniques, including the generation of monoclonal antibodies as described herein, or via transfection of antibody genes into suitable bacterial or mammalian cell hosts, in order to allow for the production of recombinant antibodies. In one technique, an immunogen comprising the polypeptide is initially injected into any of a wide variety of mammals (e.g., mice, rats, rabbits, sheep or goats). In this step, the polypeptides of this invention may serve as the immunogen without modification. Alternatively, particularly for relatively short polypeptides, a superior immune response may be elicited if the polypeptide is joined to a carrier protein, such as bovine serum albumin or keyhole limpet hemocyanin. The immunogen is injected into the animal host, preferably according to a predetermined schedule incorporating one or more booster immunizations, and the animals are bled periodically. Polyclonal antibodies specific for the polypeptide may then be purified from such antisera by, for example, affinity chromatography using the polypeptide coupled to a suitable solid support.

[0186] Monoclonal antibodies specific for an antigenic polypeptide of interest may be prepared, for example, using the technique of Kohler and Milstein, Eur. J. Immunol. 6:511-519, 1976, and improvements thereto. Briefly, these methods involve the preparation of immortal cell lines capable of producing antibodies having the desired specificity (i.e., reactivity with the polypeptide of interest). Such cell lines may be produced, for example, from spleen cells obtained from an animal immunized as described above. The spleen cells are then immortalized by, for example, fusion with a myeloma cell fusion partner, preferably one that is syngeneic with the immunized animal. A variety of fusion techniques may be employed. For example, the spleen cells and myeloma cells may be combined with a nonionic detergent for a few minutes and then plated at low density on a selective medium that supports the growth of hybrid cells, but not myeloma cells. A preferred selection technique uses HAT (hypoxanthine, aminopterin, thymidine) selection. After a sufficient time, usually about 1 to 2 weeks, colonies of hybrids are observed. Single colonies are selected and their culture supernatants tested for binding activity against the polypeptide. Hybridomas having high reactivity and specificity are preferred.

[0187] Monoclonal antibodies may be isolated from the supernatants of growing hybridoma colonies. In addition, various techniques may be employed to enhance the yield, such as injection of the hybridoma cell line into the peritoneal cavity of a suitable vertebrate host, such as a mouse. Monoclonal antibodies may then be harvested from the ascites fluid or the blood. Contaminants may be removed from the antibodies by conventional techniques, such as chromatography, gel filtration, precipitation, and extraction. The polypeptides of this invention may be used in the purification process in, for example, an affinity chromatography step.

[0188] A number of therapeutically useful molecules are known in the art which comprise antigen-binding sites that are capable of exhibiting immunological binding properties of an antibody molecule. The proteolytic enzyme papain preferentially cleaves IgG molecules to yield several fragments, two of which (the “F(ab)” fragments) each comprise a covalent heterodimer that includes an intact antigen-binding site. The enzyme pepsin is able to cleave IgG molecules to provide several fragments, including the “F(ab′)₂” fragment which comprises both antigen-binding sites. An “Fv” fragment can be produced by preferential proteolytic cleavage of an IgM, and on rare occasions IgG or IgA immunoglobulin molecule. Fv fragments are, however, more commonly derived using recombinant techniques known in the art. The Fv fragment includes a non-covalent V_{H}::V_{L} heterodimer including an antigen-binding site which retains much of the antigen recognition and binding capabilities of the native antibody molecule. Inbar et al. (1972) Proc. Nat. Acad. Sci. USA 69:2659-2662; Hochman et al. (1976) Biochem 15:2706-2710; and Ehrlich et al. (1980) Biochem 19:4091-4096.

[0189] A single chain Fv (“sFv”) polypeptide is a covalently linked V_{H}::V_{L} heterodimer which is expressed from a gene fusion including V_{H}- and V_{L}-encoding genes linked by a peptide-encoding linker. Huston et al. (1988) Proc. Nat. Acad. Sci. USA 85(16):5879-5883. A number of methods have been described to discern chemical structures for converting the naturally aggregated—but chemically separated—light and heavy polypeptide chains from an antibody V region into an sFv molecule which will fold into a three dimensional structure substantially similar to the structure of an antigen-binding site. See, e.g., U.S. Pat. Nos. 5,091,513 and 5,132,405, to Huston et al.; and U.S. Pat. No. 4,946,778, to Ladner et al.

[0190] Each of the above-described molecules includes a heavy chain and a light chain CDR set, respectively interposed between a heavy chain and a light chain FR set which provide support to the CDRS and define the spatial relationship of the CDRs relative to each other. As used herein, the term “CDR set” refers to the three hypervariable regions of a heavy or light chain V region. Proceeding from the N-terminus of a heavy or light chain, these regions are denoted as “CDR1,” “CDR2,” and “CDR3” respectively. An antigen-binding site, therefore, includes six CDRs, comprising the CDR set from each of a heavy and a light chain V region. A polypeptide comprising a single CDR, (e.g., a CDR1, CDR2 or CDR3) is referred to herein as a “molecular recognition unit.” Crystallographic analysis of a number of antigen-antibody complexes has demonstrated that the amino acid residues of CDRs form extensive contact with bound antigen, wherein the most extensive antigen contact is with the heavy chain CDR3. Thus, the molecular recognition units are primarily responsible for the specificity of an antigen-binding site.

[0191] As used herein, the term “FR set” refers to the four flanking amino acid sequences which frame the CDRs of a CDR set of a heavy or light chain V region. Some FR residues may contact bound antigen; however, FRs are primarily responsible for folding the V region into the antigen-binding site, particularly the FR residues directly adjacent to the CDRS. Within FRs, certain amino residues and certain structural features are very highly conserved. In this regard, all V region sequences contain an internal disulfide loop of around 90 amino acid residues. When the V regions fold into a binding-site, the CDRs are displayed as projecting loop motifs which form an antigen-binding surface. It is generally recognized that there are conserved structural regions of FRs which influence the folded shape of the CDR loops into certain “canonical” structures—regardless of the precise CDR amino acid sequence. Further, certain FR residues are known to participate in non-covalent interdomain contacts which stabilize the interaction of the antibody heavy and light chains.

[0192] A number of “humanized” antibody molecules comprising an antigen-binding site derived from a non-human immunoglobulin have been described, including chimeric antibodies having rodent V regions and their associated CDRs fused to human constant domains (Winter et al. (1991) Nature 349:293-299; Lobuglio et al. (1989) Proc. Nat. Acad. Sci. USA 86:4220-4224; Shaw et al. (1987) J Immunol. 138:4534-4538; and Brown et al. (1987) Cancer Res. 47:3577-3583), rodent CDRs grafted into a human supporting FR prior to fusion with an appropriate human antibody constant domain (Riechmann et al. (1988) Nature 332:323-327; Verhoeyen et al. (1988) Science 239:1534-1536; and Jones et al. (1986) Nature 321:522-525), and rodent CDRs supported by recombinantly veneered rodent FRs (European Patent Publication No. 519,596, published Dec. 23, 1992). These “humanized” molecules are designed to minimize unwanted immunological response toward rodent antihuman antibody molecules which limits the duration and effectiveness of therapeutic applications of those moieties in human recipients.

[0193] As used herein, the terms “veneered FRs” and “recombinantly veneered FRs” refer to the selective replacement of FR residues from, e.g., a rodent heavy or light chain V region, with human FR residues in order to provide a xenogeneic molecule comprising an antigen-binding site which retains substantially all of the native FR polypeptide folding structure. Veneering techniques are based on the understanding that the ligand binding characteristics of an antigen-binding site are determined primarily by the structure and relative disposition of the heavy and light chain CDR sets within the antigen-binding surface. Davies et al. (1990) Ann. Rev. Biochem. 59:439-473. Thus, antigen binding specificity can be preserved in a humanized antibody only wherein the CDR structures, their interaction with each other, and their interaction with the rest of the V region domains are carefully maintained. By using veneering techniques, exterior (e.g., solvent-accessible) FR residues which are readily encountered by the immune system are selectively replaced with human residues to provide a hybrid molecule that comprises either a weakly immunogenic, or substantially non-immunogenic veneered surface.

[0194] The process of veneering makes use of the available sequence data for human antibody variable domains compiled by Kabat et al., in Sequences of Proteins of Immunological Interest, 4th ed., (U.S. Dept. of Health and Human Services, U.S. Government Printing Office, 1987), updates to the Kabat database, and other accessible U.S. and foreign databases (both nucleic acid and protein). Solvent accessibilities of V region amino acids can be deduced from the known three-dimensional structure for human and murine antibody fragments. There are two general steps in veneering a murine antigen-binding site. Initially, the FRs of the variable domains of an antibody molecule of interest are compared with corresponding FR sequences of human variable domains obtained from the above-identified sources. The most homologous human V regions are then compared residue by residue to corresponding murine amino acids. The residues in the murine FR which differ from the human counterpart are replaced by the residues present in the human moiety using recombinant techniques well known in the art. Residue switching is only carried out with moieties which are at least partially exposed (solvent accessible), and care is exercised in the replacement of amino acid residues which may have a significant effect on the tertiary structure of V region domains, such as proline, glycine and charged amino acids.

[0195] In this manner, the resultant “veneered” murine antigen-binding sites are thus designed to retain the murine CDR residues, the residues substantially adjacent to the CDRs, the residues identified as buried or mostly buried (solvent inaccessible), the residues believed to participate in non-covalent (e.g., electrostatic and hydrophobic) contacts between heavy and light chain domains, and the residues from conserved structural regions of the FRs which are believed to influence the “canonical” tertiary structures of the CDR loops. These design criteria are then used to prepare recombinant nucleotide sequences which combine the CDRs of both the heavy and light chain of a murine antigen-binding site into human-appearing FRs that can be used to transfect mammalian cells for the expression of recombinant human antibodies which exhibit the antigen specificity of the murine antibody molecule.

[0196] In another embodiment of the invention, monoclonal antibodies of the present invention may be coupled to one or more therapeutic agents. Suitable agents in this regard include radionuclides, differentiation inducers, drugs, toxins, and derivatives thereof. Preferred radionuclides include ⁹⁰Y, ¹²³I, ¹²⁵I, ¹³¹I, ¹⁸⁶Re, ¹⁸⁸Re, ²¹¹At, and ²¹²Bi. Preferred drugs include methotrexate, and pyrimidine and purine analogs. Preferred differentiation inducers include phorbol esters and butyric acid. Preferred toxins include ricin, abrin, diptheria toxin, cholera toxin, gelonin, Pseudomonas exotoxin, Shigella toxin, and pokeweed antiviral protein.

[0197] A therapeutic agent may be coupled (e.g., covalently bonded) to a suitable monoclonal antibody either directly or indirectly (e.g., via a linker group). A direct reaction between an agent and an antibody is possible when each possesses a substituent capable of reacting with the other. For example, a nucleophilic group, such as an amino or sulfhydryl group, on one may be capable of reacting with a carbonyl-containing group, such as an anhydride or an acid halide, or with an alkyl group containing a good leaving group (e.g., a halide) on the other.

[0198] Alternatively, it may be desirable to couple a therapeutic agent and an antibody via a linker group. A linker group can function as a spacer to distance an antibody from an agent in order to avoid interference with binding capabilities. A linker group can also serve to increase the chemical reactivity of a substituent on an agent or an antibody, and thus increase the coupling efficiency. An increase in chemical reactivity may also facilitate the use of agents, or functional groups on agents, which otherwise would not be possible.

[0199] It will be evident to those skilled in the art that a variety of bifunctional or polyfunctional reagents, both homo- and hetero-functional (such as those described in the catalog of the Pierce Chemical Co., Rockford, Ill.), may be employed as the linker group. Coupling may be effected, for example, through amino groups, carboxyl groups, sulfhydryl groups or oxidized carbohydrate residues. There are numerous references describing such methodology, e.g., U.S. Pat. No. 4,671,958, to Rodwell et al.

[0200] Where a therapeutic agent is more potent when free from the antibody portion of the immunoconjugates of the present invention, it may be desirable to use a linker group which is cleavable during or upon internalization into a cell. A number of different cleavable linker groups have been described. The mechanisms for the intracellular release of an agent from these linker groups include cleavage by reduction of a disulfide bond (e.g., U.S. Pat. No. 4,489,710, to Spitler), by irradiation of a photolabile bond (e.g., U.S. Pat. No. 4,625,014, to Senter et al.), by hydrolysis of derivatized amino acid side chains (e.g., U.S. Pat. No. 4,638,045, to Kohn et al.), by serum complement-mediated hydrolysis (e.g., U.S. Pat. No. 4,671,958, to Rodwell et al.), and acid-catalyzed hydrolysis (e.g., U.S. Pat. No. 4,569,789, to Blattler et al.).

[0201] It may be desirable to couple more than one agent to an antibody. In one embodiment, multiple molecules of an agent are coupled to one antibody molecule. In another embodiment, more than one type of agent may be coupled to one antibody. Regardless of the particular embodiment, immunoconjugates with more than one agent may be prepared in a variety of ways. For example, more than one agent may be coupled directly to an antibody molecule, or linkers that provide multiple sites for attachment can be used. Alternatively, a carrier can be used.

[0202] A carrier may bear the agents in a variety of ways, including covalent bonding either directly or via a linker group. Suitable carriers include proteins such as albumins (e.g., U.S. Pat. No. 4,507,234, to Kato et al.), peptides and polysaccharides such as aminodextran (e.g., U.S. Pat. No. 4,699,784, to Shih et al.). A carrier may also bear an agent by noncovalent bonding or by encapsulation, such as within a liposome vesicle (e.g., U.S. Pat. Nos. 4,429,008 and 4,873,088). Carriers specific for radionuclide agents include radiohalogenated small molecules and chelating compounds. For example, U.S. Pat. No. 4,735,792 discloses representative radiohalogenated small molecules and their synthesis. A radionuclide chelate may be formed from chelating compounds that include those containing nitrogen and sulfur atoms as the donor atoms for binding the metal, or metal oxide, radionuclide. For example, U.S. Pat. No. 4,673,562, to Davison et al. discloses representative chelating compounds and their synthesis.

[0203] T Cell Compositions

[0204] The present invention, in another aspect, provides T cells specific for a tumor polypeptide disclosed herein, or for a variant or derivative thereof. Such cells may generally be prepared in vitro or ex vivo, using standard procedures. For example, T cells may be isolated from bone marrow, peripheral blood, or a fraction of bone marrow or peripheral blood of a patient, using a commercially available cell separation system, such as the Isolex™ System, available from Nexell Therapeutics, Inc. (Irvine, Calif.; see also U.S. Pat. No. 5,240,856; U.S. Pat. No. 5,215,926; WO 89/06280; WO 91/16116 and WO 92/07243). Alternatively, T cells may be derived from related or unrelated humans, non-human mammals, cell lines or cultures.

[0205] T cells may be stimulated with a polypeptide, polynucleotide encoding a polypeptide and/or an antigen presenting cell (APC) that expresses such a polypeptide. Such stimulation is performed under conditions and for a time sufficient to permit the generation of T cells that are specific for the polypeptide of interest. Preferably, a tumor polypeptide or polynucleotide of the invention is present within a delivery vehicle, such as a microsphere, to facilitate the generation of specific T cells.

[0206] T cells are considered to be specific for a polypeptide of the present invention if the T cells specifically proliferate, secrete cytokines or kill target cells coated with the polypeptide or expressing a gene encoding the polypeptide. T cell specificity may be evaluated using any of a variety of standard techniques. For example, within a chromium release assay or proliferation assay, a stimulation index of more than two fold increase in lysis and/or proliferation, compared to negative controls, indicates T cell specificity. Such assays may be performed, for example, as described in Chen et al., Cancer Res. 54:1065-1070,1994. Alternatively, detection of the proliferation of T cells may be accomplished by a variety of known techniques. For example, T cell proliferation can be detected by measuring an increased rate of DNA synthesis (e.g., by pulse-labeling cultures of T cells with tritiated thymidine and measuring the amount of tritiated thymidine incorporated into DNA). Contact with a tumor polypeptide (100 ng/ml−100 μg/ml, preferably 200 ng/ml−25 μg/ml) for 3-7 days will typically result in at least a two fold increase in proliferation of the T cells. Contact as described above for 2-3 hours should result in activation of the T cells, as measured using standard cytokine assays in which a two fold increase in the level of cytokine release (e.g., TNF or IFN-γ) is indicative of T cell activation (see Coligan et al., Current Protocols in Immunology, vol. 1, Wiley Interscience (Greene 1998)). T cells that have been activated in response to a tumor polypeptide, polynucleotide or polypeptide-expressing APC may be CD4⁺ and/or CD8⁺. Tumor polypeptide-specific T cells may be expanded using standard techniques. Within preferred embodiments, the T cells are derived from a patient, a related donor or an unrelated donor, and are administered to the patient following stimulation and expansion.

[0207] For therapeutic purposes, CD4⁺ or CD8⁺ T cells that proliferate in response to a tumor polypeptide, polynucleotide or APC can be expanded in number either in vitro or in vivo. Proliferation of such T cells in vitro may be accomplished in a variety of ways. For example, the T cells can be re-exposed to a tumor polypeptide, or a short peptide corresponding to an immunogenic portion of such a polypeptide, with or without the addition of T cell growth factors, such as interleukin-2, and/or stimulator cells that synthesize a tumor polypeptide. Alternatively, one or more T cells that proliferate in the presence of the tumor polypeptide can be expanded in number by cloning. Methods for cloning cells are well known in the art, and include limiting dilution.

[0208] T Cell Receptor Compositions

[0209] The T cell receptor (TCR) consists of 2 different, highly variable polypeptide chains, termed the T-cell receptor α and β chains, that are linked by a disulfide bond (Janeway, Travers, Walport. Immunobiology. Fourth Ed., 148-159. Elsevier Science Ltd/Garland Publishing. 1999). The α/β heterodimer complexes with the invariant CD3 chains at the cell membrane. This complex recognizes specific antigenic peptides bound to MHC molecules. The enormous diversity of TCR specificities is generated much like immunoglobulin diversity, through somatic gene rearrangement. The β chain genes contain over 50 variable (V), 2 diversity (D), over 10 joining (J) segments, and 2 constant region segments (C). The α chain genes contain over 70 V segments, and over 60 J segments but no D segments, as well as one C segment. During T cell development in the thymus, the D to J gene rearrangement of the β chain occurs, followed by the V gene segment rearrangement to the DJ. This functional VDJ_{β} exon is transcribed and spliced to join to a C_{β}. For the α chain, a V_{α} gene segment rearranges to a J_{α} gene segment to create the functional exon that is then transcribed and spliced to the C_{α}. Diversity is further increased during the recombination process by the random addition of P and N-nucleotides between the V, D, and J segments of the β chain and between the V and J segments in the α chain (Janeway, Travers, Walport. Immunobiology. Fourth Ed., 98 and 150. Elsevier Science Ltd/Garland Publishing. 1999).

[0210] The present invention, in another aspect, provides TCRs specific for a polypeptide disclosed herein, or for a variant or derivative thereof. In accordance with the present invention, polynucleotide and amino acid sequences are provided for the V-J or V-D-J junctional regions or parts thereof for the alpha and beta chains of the T-cell receptor which recognize tumor polypeptides described herein. In general, this aspect of the invention relates to T-cell receptors which recognize or bind tumor polypeptides presented in the context of MHC. In a preferred embodiment the tumor antigens recognized by the T-cell receptors comprise a polypeptide of the present invention. For example, cDNA encoding a TCR specific for a colon tumor peptide can be isolated from T cells specific for a tumor polypeptide using standard molecular biological and recombinant DNA techniques.

[0211] This invention further includes the T-cell receptors or analogs thereof having substantially the same function or activity as the T-cell receptors of this invention which recognize or bind tumor polypeptides. Such receptors include, but are not limited to, a fragment of the receptor, or a substitution, addition or deletion mutant of a T-cell receptor provided herein. This invention also encompasses polypeptides or peptides that are substantially homologous to the T-cell receptors provided herein or that retain substantially the same activity. The term “analog” includes any protein or polypeptide having an amino acid residue sequence substantially identical to the T-cell receptors provided herein in which one or more residues, preferably no more than 5 residues, more preferably no more than 25 residues have been conservatively substituted with a functionally similar residue and which displays the functional aspects of the T-cell receptor as described herein.

[0212] The present invention further provides for suitable mammalian host cells, for example, non-specific T cells, that are transfected with a polynucleotide encoding TCRs specific for a polypeptide described herein, thereby rendering the host cell specific for the polypeptide. The α and β chains of the TCR may be contained on separate expression vectors or alternatively, on a single expression vector that also contains an internal ribosome entry site (IRES) for cap-independent translation of the gene downstream of the IRES. Said host cells expressing TCRs specific for the polypeptide may be used, for example, for adoptive immunotherapy of colon cancer as discussed further below.

[0213] In further aspects of the present invention, cloned TCRs specific for a polypeptide recited herein may be used in a kit for the diagnosis of colon cancer. For example, the nucleic acid sequence or portions thereof, of tumor-specific TCRs can be used as probes or primers for the detection of expression of the rearranged genes encoding the specific TCR in a biological sample. Therefore, the present invention further provides for an assay for detecting messenger RNA or DNA encoding the TCR specific for a polypeptide.

[0214] Pharmaceutical Compositions

[0215] In additional embodiments, the present invention concerns formulation of one or more of the polynucleotide, polypeptide, T-cell, TCR, and/or antibody compositions disclosed herein in pharmaceutically-acceptable carriers for administration to a cell or an animal, either alone, or in combination with one or more other modalities of therapy.

[0216] It will be understood that, if desired, a composition as disclosed herein may be administered in combination with other agents as well, such as, e.g., other proteins or polypeptides or various pharmaceutically-active agents. In fact, there is virtually no limit to other components that may also be included, given that the additional agents do not cause a significant adverse effect upon contact with the target cells or host tissues. The compositions may thus be delivered along with various other agents as required in the particular instance. Such compositions may be purified from host cells or other biological sources, or alternatively may be chemically synthesized as described herein. Likewise, such compositions may further comprise substituted or derivatized RNA or DNA compositions.

[0217] Therefore, in another aspect of the present invention, pharmaceutical compositions are provided comprising one or more of the polynucleotide, polypeptide, antibody, TCR, and/or T-cell compositions described herein in combination with a physiologically acceptable carrier. In certain preferred embodiments, the pharmaceutical compositions of the invention comprise immunogenic polynucleotide and/or polypeptide compositions of the invention for use in prophylactic and theraputic vaccine applications. Vaccine preparation is generally described in, for example, M. F. Powell and M. J. Newman, eds., “Vaccine Design (the subunit and adjuvant approach),” Plenum Press (NY, 1995). Generally, such compositions will comprise one or more polynucleotide and/or polypeptide compositions of the present invention in combination with one or more immunostimulants.

[0218] It will be apparent that any of the pharmaceutical compositions described herein can contain pharmaceutically acceptable salts of the polynucleotides and polypeptides of the invention. Such salts can be prepared, for example, from pharmaceutically acceptable non-toxic bases, including organic bases (e.g., salts of primary, secondary and tertiary amines and basic amino acids) and inorganic bases (e.g., sodium, potassium, lithium, ammonium, calcium and magnesium salts).

[0219] In another embodiment, illustrative immunogenic compositions, e.g., vaccine compositions, of the present invention comprise DNA encoding one or more of the polypeptides as described above, such that the polypeptide is generated in situ. As noted above, the polynucleotide may be administered within any of a variety of delivery systems known to those of ordinary skill in the art. Indeed, numerous gene delivery techniques are well known in the art, such as those described by Rolland, Crit. Rev. Therap. Drug Carrier Systems 15:143-198, 1998, and references cited therein. Appropriate polynucleotide expression systems will, of course, contain the necessary regulatory DNA regulatory sequences for expression in a patient (such as a suitable promoter and terminating signal). Alternatively, bacterial delivery systems may involve the administration of a bacterium (such as Bacillus-Calmette-Guerrin) that expresses an immunogenic portion of the polypeptide on its cell surface or secretes such an epitope.

[0220] Therefore, in certain embodiments, polynucleotides encoding immunogenic polypeptides described herein are introduced into suitable mammalian host cells for expression using any of a number of known viral-based systems. In one illustrative embodiment, retroviruses provide a convenient and effective platform for gene delivery systems. A selected nucleotide sequence encoding a polypeptide of the present invention can be inserted into a vector and packaged in retroviral particles using techniques known in the art. The recombinant virus can then be isolated and delivered to a subject. A number of illustrative retroviral systems have been described (e.g., U.S. Pat. No. 5,219,740; Miller and Rosman (1989) BioTechniques 7:980-990; Miller, A. D. (1990) Human Gene Therapy 1:5-14; Scarpa et al. (1991) Virology 180:849-852; Burns et al. (1993) Proc. Natl. Acad. Sci. USA 90:8033-8037; and Boris-Lawrie and Temin (1993) Cur. Opin. Genet. Develop. 3:102-109.

[0221] In addition, a number of illustrative adenovirus-based systems have also been described. Unlike retroviruses which integrate into the host genome, adenoviruses persist extrachromosomally thus minimizing the risks associated with insertional mutagenesis (Haj-Ahmad and Graham (1986) J. Virol. 57:267-274; Bett et al. (1993) J. Virol. 67:5911-5921; Mittereder et al. (1994) Human Gene Therapy 5:717-729; Seth et al. (1994) J. Virol. 68:933-940; Barr et al. (1994) Gene Therapy 1:51-58; Berkner, K. L. (1988) BioTechniques 6:616-629; and Rich et al. (1993) Human Gene Therapy 4:461-476).

[0222] Various adeno-associated virus (AAV) vector systems have also been developed for polynucleotide delivery. AAV vectors can be readily constructed using techniques well known in the art. See, e.g., U.S. Pat. Nos. 5,173,414 and 5,139,941; International Publication Nos. WO 92/01070 and WO 93/03769; Lebkowski et al. (1988) Molec. Cell. Biol. 8:3988-3996; Vincent et al. (1990) Vaccines 90 (Cold Spring Harbor Laboratory Press); Carter, B. J. (1992) Current Opinion in Biotechnology 3:533-539; Muzyczka, N. (1992) Current Topics in Microbiol. and Immunol. 158:97-129; Kotin, R. M. (1994) Human Gene Therapy 5:793-801; Shelling and Smith (1994) Gene Therapy 1:165-169; and Zhou et al. (1994) J. Exp. Med. 179:1867-1875.

[0223] Additional viral vectors useful for delivering the polynucleotides encoding polypeptides of the present invention by gene transfer include those derived from the pox family of viruses, such as vaccinia virus and avian poxvirus. By way of example, vaccinia virus recombinants expressing the novel molecules can be constructed as follows. The DNA encoding a polypeptide is first inserted into an appropriate vector so that it is adjacent to a vaccinia promoter and flanking vaccinia DNA sequences, such as the sequence encoding thymidine kinase (TK). This vector is then used to transfect cells which are simultaneously infected with vaccinia. Homologous recombination serves to insert the vaccinia promoter plus the gene encoding the polypeptide of interest into the viral genome. The resulting TK.sup.(−) recombinant can be selected by culturing the cells in the presence of 5-bromodeoxyuridine and picking viral plaques resistant thereto.

[0224] A vaccinia-based infection/transfection system can be conveniently used to provide for inducible, transient expression or coexpression of one or more polypeptides described herein in host cells of an organism. In this particular system, cells are first infected in vitro with a vaccinia virus recombinant that encodes the bacteriophage T7 RNA polymerase. This polymerase displays exquisite specificity in that it only transcribes templates bearing T7 promoters. Following infection, cells are transfected with the polynucleotide or polynucleotides of interest, driven by a T7 promoter. The polymerase expressed in the cytoplasm from the vaccinia virus recombinant transcribes the transfected DNA into RNA which is then translated into polypeptide by the host translational machinery. The method provides for high level, transient, cytoplasmic production of large quantities of RNA and its translation products. See, e.g., Elroy-Stein and Moss, Proc. Natl. Acad. Sci. USA (1990) 87:6743-6747; Fuerst et al. Proc. Natl. Acad. Sci. USA (1986) 83:8122-8126.

[0225] Alternatively, avipoxviruses, such as the fowlpox and canarypox viruses, can also be used to deliver the coding sequences of interest. Recombinant avipox viruses, expressing immunogens from mammalian pathogens, are known to confer protective immunity when administered to non-avian species. The use of an Avipox vector is particularly desirable in human and other mammalian species since members of the Avipox genus can only productively replicate in susceptible avian species and therefore are not infective in mammalian cells. Methods for producing recombinant Avipoxviruses are known in the art and employ genetic recombination, as described above with respect to the production of vaccinia viruses. See, e.g., WO 91/12882; WO 89/03429; and WO 92/03545.

[0226] Any of a number of alphavirus vectors can also be used for delivery of polynucleotide compositions of the present invention, such as those vectors described in U.S. Pat. Nos. 5,843,723; 6,015,686; 6,008,035 and 6,015,694. Certain vectors based on Venezuelan Equine Encephalitis (VEE) can also be used, illustrative examples of which can be found in U.S. Pat. Nos. 5,505,947 and 5,643,576.

[0227] Moreover, molecular conjugate vectors, such as the adenovirus chimeric vectors described in Michael et al. J. Biol. Chem. (1993) 268:6866-6869 and Wagner et al. Proc. Natl. Acad. Sci. USA (1992) 89:6099-6103, can also be used for gene delivery under the invention.

[0228] Additional illustrative information on these and other known viral-based delivery systems can be found, for example, in Fisher-Hoch et al., Proc. Natl. Acad. Sci. USA 86:317-321,1989; Flexner et al., Ann. N. Y. Acad. Sci. 569:86-103, 1989; Flexner et al., Vaccine 8:17-21, 1990; U.S. Pat. Nos. 4,603,112, 4,769,330, and 5,017,487; WO 89/01973; U.S. Pat. No. 4,777,127; GB 2,200,651; EP 0,345,242; WO 91/02805; Berkner, Biotechniques 6:616-627, 1988; Rosenfeld et al., Science 252:431-434,1991; Kolls et al., Proc. Natl. Acad. Sci. USA 91:215-219, 1994; Kass-Eisler et al., Proc. Natl. Acad. Sci. USA 90:11498-11502,1993; Guzman et al., Circulation 88:2838-2848, 1993; and Guzman et al., Cir. Res. 73:1202-1207, 1993.

[0229] In certain embodiments, a polynucleotide may be integrated into the genome of a target cell. This integration may be in the specific location and orientation via homologous recombination (gene replacement) or it may be integrated in a random, non-specific location (gene augmentation). In yet further embodiments, the polynucleotide may be stably maintained in the cell as a separate, episomal segment of DNA. Such polynucleotide segments or “episomes” encode sequences sufficient to permit maintenance and replication independent of or in synchronization with the host cell cycle. The manner in which the expression construct is delivered to a cell and where in the cell the polynucleotide remains is dependent on the type of expression construct employed.

[0230] In another embodiment of the invention, a polynucleotide is administered/delivered as “naked” DNA, for example as described in Ulmer et al., Science 259:1745-1749,1993 and reviewed by Cohen, Science 259:1691-1692, 1993. The uptake of naked DNA may be increased by coating the DNA onto biodegradable beads, which are efficiently transported into the cells.

[0231] In still another embodiment, a composition of the present invention can be delivered via a particle bombardment approach, many of which have been described. In one illustrative example, gas-driven particle acceleration can be achieved with devices such as those manufactured by Powderject Pharmaceuticals PLC (Oxford, UK) and Powderject Vaccines Inc. (Madison, Wis.), some examples of which are described in U.S. Pat. Nos. 5,846,796; 6,010,478; 5,865,796; 5,584,807; and EP Patent No. 0500 799. This approach offers a needle-free delivery approach wherein a dry powder formulation of microscopic particles, such as polynucleotide or polypeptide particles, are accelerated to high speed within a helium gas jet generated by a hand held device, propelling the particles into a target tissue of interest.

[0232] In a related embodiment, other devices and methods that may be useful for gas-driven needle-less injection of compositions of the present invention include those provided by Bioject, Inc. (Portland, Oreg.), some examples of which are described in U.S. Pat. Nos. 4,790,824; 5,064,413; 5,312,335; 5,383,851; 5,399,163; 5,520,639 and 5,993,412.

[0233] According to another embodiment, the pharmaceutical compositions described herein will comprise one or more immunostimulants in addition to the immunogenic polynucleotide, polypeptide, antibody, T-cell, TCR, and/or APC compositions of this invention. An immunostimulant refers to essentially any substance that enhances or potentiates an immune response (antibody and/or cell-mediated) to an exogenous antigen. One preferred type of immunostimulant comprises an adjuvant. Many adjuvants contain a substance designed to protect the antigen from rapid catabolism, such as aluminum hydroxide or mineral oil, and a stimulator of immune responses, such as lipid A, Bortadella pertussis or Mycobacterium tuberculosis derived proteins. Certain adjuvants are commercially available as, for example, Freund's Incomplete Adjuvant and Complete Adjuvant (Difco Laboratories, Detroit, Mich.); Merck Adjuvant 65 (Merck and Company, Inc., Rahway, N.J.); AS-2 (SmithKline Beecham, Philadelphia, Pa.); aluminum salts such as aluminum hydroxide gel (alum) or aluminum phosphate; salts of calcium, iron or zinc; an insoluble suspension of acylated tyrosine; acylated sugars; cationically or anionically derivatized polysaccharides; polyphosphazenes; biodegradable microspheres; monophosphoryl lipid A and quil A. Cytokines, such as GM-CSF, interleukin-2, -7, -12, and other like growth factors, may also be used as adjuvants.

[0234] Within certain embodiments of the invention, the adjuvant composition is preferably one that induces an immune response predominantly of the Th1 type. High levels of Th1-type cytokines (e.g., IFN-γ, TNFα, IL-2 and IL-12) tend to favor the induction of cell mediated immune responses to an administered antigen. In contrast, high levels of Th2-type cytokines (e.g., IL-4, IL-5, IL-6 and IL-10) tend-to favor the induction of humoral immune responses. Following application of a vaccine as provided herein, a patient will support an immune response that includes Th1- and Th2-type responses. Within a preferred embodiment, in which a response is predominantly Th1-type, the level of Th1-type cytokines will increase to a greater extent than the level of Th2-type cytokines. The levels of these cytokines may be readily assessed using standard assays. For a review of the families of cytokines, see Mosmann and Coffman, Ann. Rev. Immunol. 7:145-173,1989.

[0235] Certain preferred adjuvants for eliciting a predominantly Th1-type response include, for example, a combination of monophosphoryl lipid A, preferably 3-de-O-acylated monophosphoryl lipid A, together with an aluminum salt. MPL® adjuvants are available from Corixa Corporation (Seattle, Wash.; see, for example, U.S. Pat. Nos. 4,436,727; 4,877,611; 4,866,034 and 4,912,094). CpG-containing oligonucleotides (in which the CpG dinucleotide is unmethylated) also induce a predominantly Th1 response. Such oligonucleotides are well known and are described, for example, in WO 96/02555, WO 99/33488 and U.S. Pat. Nos. 6,008,200 and 5,856,462. Immunostimulatory DNA sequences are also described, for example, by Sato et al., Science 273:352, 1996. Another preferred adjuvant comprises a saponin, such as Quil A, or derivatives thereof, including QS21 and QS7 (Aquila Biopharmaceuticals Inc., Framingham, Mass.); Escin; Digitonin; or Gypsophila or Chenopodium quinoa saponins. Other preferred formulations include more than one saponin in the adjuvant combinations of the present invention, for example combinations of at least two of the following group comprising QS21, QS7, Quil A, β-escin, or digitonin.

[0236] Alternatively the saponin formulations may be combined with vaccine vehicles composed of chitosan or other polycationic polymers, polylactide and polylactide-co-glycolide particles, poly-N-acetyl glucosamine-based polymer matrix, particles composed of polysaccharides or chemically modified polysaccharides, liposomes and lipid-based particles, particles composed of glycerol monoesters, etc. The saponins may also be formulated in the presence of cholesterol to form particulate structures such as liposomes or ISCOMs. Furthermore, the saponins may be formulated together with a polyoxyethylene ether or ester, in either a non-particulate solution or suspension, or in a particulate structure such as a paucilamelar liposome or ISCOM. The saponins may also be formulated with excipients such as Carbopol^{R} to increase viscosity, or may be formulated in a dry powder form with a powder excipient such as lactose.

[0237] In one preferred embodiment, the adjuvant system includes the combination of a monophosphoryl lipid A and a saponin derivative, such as the combination of QS21 and 3D-MPL® adjuvant, as described in WO 94/00153, or a less reactogenic composition where the QS21 is quenched with cholesterol, as described in WO 96/33739. Other preferred formulations comprise an oil-in-water emulsion and tocopherol. Another particularly preferred adjuvant formulation employing QS21, 3D-MPL® adjuvant and tocopherol in an oil-in-water emulsion is described in WO 95/17210.

[0238] Another enhanced adjuvant system involves the combination of a CpG-containing oligonucleotide and a saponin derivative particularly the combination of CpG and QS21 is disclosed in WO 00/09159. Preferably the formulation additionally comprises an oil in water emulsion and tocopherol.

[0239] Additional illustrative adjuvants for use in the pharmaceutical compositions of the invention include Montanide ISA 720 (Seppic, France), SAF (Chiron, Calif., U.S.), ISCOMS (CSL), MF-59 (Chiron), the SBAS series of adjuvants (e.g., SBAS-2 or SBAS-4, available from SmithKline Beecham, Rixensart, Belgium), Detox (Enhanzyn®) (Corixa, Hamilton, Mont.), RC-529 (Corixa, Hamilton, Mont.) and other aminoalkyl glucosaminide 4-phosphates (AGPs), such as those described in pending U.S. patent application Ser. Nos. 08/853,826 and 09/074,720, the disclosures of which are incorporated herein by reference in their entireties, and polyoxyethylene ether adjuvants such as those described in WO 99/52549A1.

[0240] Other preferred adjuvants include adjuvant molecules of the general formula

HO(CH₂CH₂O)ₙ-A-R, (I)

[0241] wherein, n is 1-50, A is a bond or —C(O)—, R is C₁₋₅₀ alkyl or Phenyl C₁₋₅₀ alkyl.

[0242] One embodiment of the present invention consists of a vaccine formulation comprising a polyoxyethylene ether of general formula (I), wherein n is between 1 and 50, preferably 4-24, most preferably 9; the R component is C₁₋₅₀, preferably C₄-C₂₀ alkyl and most preferably C₁₂ alkyl, and A is a bond. The concentration of the polyoxyethylene ethers should be in the range 0.1-20%, preferably from 0.1-10%, and most preferably in the range 0.1-1%. Preferred polyoxyethylene ethers are selected from the following group: polyoxyethylene-9-lauryl ether, polyoxyethylene-9-steoryl ether, polyoxyethylene-8-steoryl ether, polyoxyethylene-4-lauryl ether, polyoxyethylene-35-lauryl ether, and polyoxyethylene-23-lauryl ether. Polyoxyethylene ethers such as polyoxyethylene lauryl ether are described in the Merck index (12^{th} edition: entry 7717). These adjuvant molecules are described in WO 99/52549.

[0243] The polyoxyethylene ether according to the general formula (I) above may, if desired, be combined with another adjuvant. For example, a preferred adjuvant combination is preferably with CpG as described in the pending UK patent application GB 9820956.2.

[0244] According to another embodiment of this invention, an immunogenic composition described herein is delivered to a host via antigen presenting cells (APCs), such as dendritic cells, macrophages, B cells, monocytes and other cells that may be engineered to be efficient APCs. Such cells may, but need not, be genetically modified to increase the capacity for presenting the antigen, to improve activation and/or maintenance of the T cell response, to have anti-tumor effects per se and/or to be immunologically compatible with the receiver (i.e., matched HLA haplotype). APCs may generally be isolated from any of a variety of biological fluids and organs, including tumor and peritumoral tissues, and may be autologous, allogeneic, syngeneic or xenogeneic cells.

[0245] Certain preferred embodiments of the present invention use dendritic cells or progenitors thereof as antigen-presenting cells. Dendritic cells are highly potent APCs (Banchereau and Steinman, Nature 392:245-251,1998) and have been shown to be effective as a physiological adjuvant for eliciting prophylactic or therapeutic antitumor immunity (see Timmerman and Levy, Ann. Rev. Med. 50:507-529,1999). In general, dendritic cells may be identified based on their typical shape (stellate in situ, with marked cytoplasmic processes (dendrites) visible in vitro), their ability to take up, process and present antigens with high efficiency and their ability to activate naive T cell responses. Dendritic cells may, of course, be engineered to express specific cell-surface receptors or ligands that are not commonly found on dendritic cells in vivo or ex vivo, and such modified dendritic cells are contemplated by the present invention. As an alternative to dendritic cells, secreted vesicles antigen-loaded dendritic cells (called exosomes) may be used within a vaccine (see Zitvogel et al., Nature Med. 4:594-600,1998).

[0246] Dendritic cells and progenitors may be obtained from peripheral blood, bone marrow, tumor-infiltrating cells, peritumoral tissues-infiltrating cells, lymph nodes, spleen, skin, umbilical cord blood or any other suitable tissue or fluid. For example, dendritic cells may be differentiated ex vivo by adding a combination of cytokines such as GM-CSF, IL-4, IL-1 3 and/or TNFα to cultures of monocytes harvested from peripheral blood. Alternatively, CD34 positive cells harvested from peripheral blood, umbilical cord blood or bone marrow may be differentiated into dendritic cells by adding to the culture medium combinations of GM-CSF, IL-3, TNFα, CD40 ligand, LPS, fit3 ligand and/or other compound(s) that induce differentiation, maturation and proliferation of dendritic cells.

[0247] Dendritic cells are conveniently categorized as “immature” and “mature” cells, which allows a simple way to discriminate between two well characterized phenotypes. However, this nomenclature should not be construed to exclude all possible intermediate stages of differentiation. Immature dendritic cells are characterized as APC with a high capacity for antigen uptake and processing, which correlates with the high expression of Fcγ receptor and mannose receptor. The mature phenotype is typically characterized by a lower expression of these markers, but a high expression of cell surface molecules responsible for T cell activation such as class I and class 11 MHC, adhesion molecules (e.g., CD54 and CD11) and costimulatory molecules (e.g., CD40, CD80, CD86 and 4-1BB).

[0248] APCs may generally be transfected with a polynucleotide of the invention (or portion or other variant thereof) such that the encoded polypeptide, or an immunogenic portion thereof, is expressed on the cell surface. Such transfection may take place ex vivo, and a pharmaceutical composition comprising such transfected cells may then be used for therapeutic purposes, as described herein. Alternatively, a gene delivery vehicle that targets a dendritic or other antigen presenting cell may be administered to a patient, resulting in transfection that occurs in vivo. In vivo and ex vivo transfection of dendritic cells, for example, may generally be performed using any methods known in the art, such as those described in WO 97/24447, or the gene gun approach described by Mahvi et al., Immunology and cell Biology 75:456-460,1997. Antigen loading of dendritic cells may be achieved by incubating dendritic cells or progenitor cells with the tumor polypeptide, DNA (naked or within a plasmid vector) or RNA; or with antigen-expressing recombinant bacterium or viruses (e.g., vaccinia, fowlpox, adenovirus or lentivirus vectors). Prior to loading, the polypeptide may be covalently conjugated to an immunological partner that provides T cell help (e.g., a carrier molecule). Alternatively, a dendritic cell may be pulsed with a non-conjugated immunological partner, separately or in the presence of the polypeptide.

[0249] While any suitable carrier known to those of ordinary skill in the art may be employed in the pharmaceutical compositions of this invention, the type of carrier will typically vary depending on the mode of administration. Compositions of the present invention may be formulated for any appropriate manner of administration, including for example, topical, oral, nasal, mucosal, intravenous, intracranial, intraperitoneal, subcutaneous and intramuscular administration.

[0250] Carriers for use within such pharmaceutical compositions are biocompatible, and may also be biodegradable. In certain embodiments, the formulation preferably provides a relatively constant level of active component release. In other embodiments, however, a more rapid rate of release immediately upon administration may be desired. The formulation of such compositions is well within the level of ordinary skill in the art using known techniques. Illustrative carriers useful in this regard include microparticles of poly(lactide-co-glycolide), polyacrylate, latex, starch, cellulose, dextran and the like. Other illustrative delayed-release carriers include supramolecular biovectors, which comprise a non-liquid hydrophilic core (e.g., a cross-linked polysaccharide or oligosaccharide) and, optionally, an external layer comprising an amphiphilic compound, such as a phospholipid (see e.g., U.S. Pat. No. 5,151,254 and PCT applications WO 94/20078, WO/94/23701 and WO 96/06638). The amount of active compound contained within a sustained release formulation depends upon the site of implantation, the rate and expected duration of release and the nature of the condition to be treated or prevented.

[0251] In another illustrative embodiment, biodegradable microspheres (e.g., polylactate polyglycolate) are employed as carriers for the compositions of this invention. Suitable biodegradable microspheres are disclosed, for example, in U.S. Pat. Nos. 4,897,268; 5,075,109; 5,928,647; 5,811,128; 5,820,883; 5,853,763; 5,814,344, 5,407,609 and 5,942,252. Modified hepatitis B core protein carrier systems, such as described in WO/99 40934, and references cited therein, will also be useful for many applications. Another illustrative carrier/delivery system employs a carrier comprising particulate-protein complexes, such as those described in U.S. Pat. No. 5,928,647, which are capable of inducing a class I-restricted cytotoxic T lymphocyte responses in a host.

[0252] In another illustrative embodiment, calcium phosphate core particles are employed as carriers, vaccine adjuvants, or as controlled release matrices for the compositions of this invention. Exemplary calcium phosphate particles are disclosed, for example, in published patent application No. WO/0046147.

[0253] The pharmaceutical compositions of the invention will often further comprise one or more buffers (e.g., neutral buffered saline or phosphate buffered saline), carbohydrates (e.g., glucose, mannose, sucrose or dextrans), mannitol, proteins, polypeptides or amino acids such as glycine, antioxidants, bacteriostats, chelating agents such as EDTA or glutathione, adjuvants (e.g., aluminum hydroxide), solutes that render the formulation isotonic, hypotonic or weakly hypertonic with the blood of a recipient, suspending agents, thickening agents and/or preservatives. Alternatively, compositions of the present invention may be formulated as a lyophilizate.

[0254] The pharmaceutical compositions described herein may be presented in unit-dose or multi-dose containers, such as sealed ampoules or vials. Such containers are typically sealed in such a way to preserve the sterility and stability of the formulation until use. In general, formulations may be stored as suspensions, solutions or emulsions in oily or aqueous vehicles. Alternatively, a pharmaceutical composition may be stored in a freeze-dried condition requiring only the addition of a sterile liquid carrier immediately prior to use.

[0255] The development of suitable dosing and treatment regimens for using the particular compositions described herein in a variety of treatment regimens, including e.g., oral, parenteral, intravenous, intranasal, and intramuscular administration and formulation, is well known in the art, some of which are briefly discussed below for general purposes of illustration.

[0256] In certain applications, the pharmaceutical compositions disclosed herein may be delivered via oral administration to an animal. As such, these compositions may be formulated with an inert diluent or with an assimilable edible carrier, or they may be enclosed in hard- or soft-shell gelatin capsule, or they may be compressed into tablets, or they may be incorporated directly with the food of the diet.

[0257] The active compounds may even be incorporated with excipients and used in the form of ingestible tablets, buccal tables, troches, capsules, elixirs, suspensions, syrups, wafers, and the like (see, for example, Mathiowitz et al., Nature Mar. 27, 1997;386(6623):410-4; Hwang et al., Crit Rev Ther Drug Carrier Syst 1998;15(3):243-84; U.S. Pat. No. 5,641,515; U.S. Pat. No. 5,580,579 and U.S. Pat. No. 5,792,451). Tablets, troches, pills, capsules and the like may also contain any of a variety of additional components, for example, a binder, such as gum tragacanth, acacia, cornstarch, or gelatin; excipients, such as dicalcium phosphate; a disintegrating agent, such as corn starch, potato starch, alginic acid and the like; a lubricant, such as magnesium stearate; and a sweetening agent, such as sucrose, lactose or saccharin may be added or a flavoring agent, such as peppermint, oil of wintergreen, or cherry flavoring. When the dosage unit form is a capsule, it may contain, in addition to materials of the above type, a liquid carrier. Various other materials may be present as coatings or to otherwise modify the physical form of the dosage unit. For instance, tablets, pills, or capsules may be coated with shellac, sugar, or both. Of course, any material used in preparing any dosage unit form should be pharmaceutically pure and substantially non-toxic in the amounts employed. In addition, the active compounds may be incorporated into sustained-release preparation and formulations.

[0258] Typically, these formulations will contain at least about 0.1% of the active compound or more, although the percentage of the active ingredient(s) may, of course, be varied and may conveniently be between about 1 or 2% and about 60% or 70% or more of the weight or volume of the total formulation. Naturally, the amount of active compound(s) in each therapeutically useful composition may be prepared is such a way that a suitable dosage will be obtained in any given unit dose of the compound. Factors such as solubility, bioavailability, biological half-life, route of administration, product shelf life, as well as other pharmacological considerations will be contemplated by one skilled in the art of preparing such pharmaceutical formulations, and as such, a variety of dosages and treatment regimens may be desirable.

[0259] For oral administration the compositions of the present invention may alternatively be incorporated with one or more excipients in the form of a mouthwash, dentifrice, buccal tablet, oral spray, or sublingual orally-administered formulation. Alternatively, the active ingredient may be incorporated into an oral solution such as one containing sodium borate, glycerin and potassium bicarbonate, or dispersed in a dentifrice, or added in a therapeutically-effective amount to a composition that may include water, binders, abrasives, flavoring agents, foaming agents, and humectants. Alternatively the compositions may be fashioned into a tablet or solution form that may be placed under the tongue or otherwise dissolved in the mouth.

[0260] In certain circumstances it will be desirable to deliver the pharmaceutical compositions disclosed herein parenterally, intravenously, intramuscularly, or even intraperitoneally. Such approaches are well known to the skilled artisan, some of which are further described, for example, in U.S. Pat. No. 5,543,158; U.S. Pat. No. 5,641,515 and U.S. Pat. No. 5,399,363. In certain embodiments, solutions of the active compounds as free base or pharmacologically acceptable salts may be prepared in water suitably mixed with a surfactant, such as hydroxypropylcellulose. Dispersions may also be prepared in glycerol, liquid polyethylene glycols, and mixtures thereof and in oils. Under ordinary conditions of storage and use, these preparations generally will contain a preservative to prevent the growth of microorganisms.

[0261] Illustrative pharmaceutical forms suitable for injectable use include sterile aqueous solutions or dispersions and sterile powders for the extemporaneous preparation of sterile injectable solutions or dispersions (for example, see U.S. Pat. No. 5,466,468). In all cases the form must be sterile and must be fluid to the extent that easy syringability exists. It must be stable under the conditions of manufacture and storage and must be preserved against the contaminating action of microorganisms, such as bacteria and fungi. The carrier can be a solvent or dispersion medium containing, for example, water, ethanol, polyol (e.g., glycerol, propylene glycol, and liquid polyethylene glycol, and the like), suitable mixtures thereof, and/or vegetable oils. Proper fluidity may be maintained, for example, by the use of a coating, such as lecithin, by the maintenance of the required particle size in the case of dispersion and/or by the use of surfactants. The prevention of the action of microorganisms can be facilitated by various antibacterial and antifungal agents, for example, parabens, chlorobutanol, phenol, sorbic acid, thimerosal, and the like. In many cases, it will be preferable to include isotonic agents, for example, sugars or sodium chloride. Prolonged absorption of the injectable compositions can be brought about by the use in the compositions of agents delaying absorption, for example, aluminum monostearate and gelatin.

[0262] In one embodiment, for parenteral administration in an aqueous solution, the solution should be suitably buffered if necessary and the liquid diluent first rendered isotonic with sufficient saline or glucose. These particular aqueous solutions are especially suitable for intravenous, intramuscular, subcutaneous and intraperitoneal administration. In this connection, a sterile aqueous medium that can be employed will be known to those of skill in the art in light of the present disclosure. For example, one dosage may be dissolved in 1 ml of isotonic NaCl solution and either added to 1000 ml of hypodermoclysis fluid or injected at the proposed site of infusion, (see for example, “Remington's Pharmaceutical Sciences” 15th Edition, pages 1035-1038 and 1570-1580). Some variation in dosage will necessarily occur depending on the condition of the subject being treated. Moreover, for human administration, preparations will of course preferably meet sterility, pyrogenicity, and the general safety and purity standards as required by FDA Office of Biologics standards.

[0263] In another embodiment of the invention, the compositions disclosed herein may be formulated in a neutral or salt form. Illustrative pharmaceutically-acceptable salts include the acid addition salts (formed with the free amino groups of the protein) and which are formed with inorganic acids such as, for example, hydrochloric or phosphoric acids, or such organic acids as acetic, oxalic, tartaric, mandelic, and the like. Salts formed with the free carboxyl groups can also be derived from inorganic bases such as, for example, sodium, potassium, ammonium, calcium, or ferric hydroxides, and such organic bases as isopropylamine, trimethylamine, histidine, procaine and the like. Upon formulation, solutions will be administered in a manner compatible with the dosage formulation and in such amount as is therapeutically effective.

[0264] The carriers can further comprise any and all solvents, dispersion media, vehicles, coatings, diluents, antibacterial and antifungal agents, isotonic and absorption delaying agents, buffers, carrier solutions, suspensions, colloids, and the like. The use of such media and agents for pharmaceutical active substances is well known in the art. Except insofar as any conventional media or agent is incompatible with the active ingredient, its use in the therapeutic compositions is contemplated. Supplementary active ingredients can also be incorporated into the compositions. The phrase “pharmaceutically-acceptable” refers to molecular entities and compositions that do not produce an allergic or similar untoward reaction when administered to a human.

[0265] In certain embodiments, the pharmaceutical compositions may be delivered by intranasal sprays, inhalation, and/or other aerosol delivery vehicles. Methods for delivering genes, nucleic acids, and peptide compositions directly to the lungs via nasal aerosol sprays has been described, e.g., in U.S. Pat. No. 5,756,353 and U.S. Pat. No. 5,804,212. Likewise, the delivery of drugs using intranasal microparticle resins (Takenaga et al., J Controlled Release Mar. 2, 1998;52(1-2):81-7) and lysophosphatidyl-glycerol compounds (U.S. Pat. No. 5,725,871) are also well-known in the pharmaceutical arts. Likewise, illustrative transmucosal drug delivery in the form of a polytetrafluoroetheylene support matrix is described in U.S. Pat. No. 5,780,045.

[0266] In certain embodiments, liposomes, nanocapsules, microparticles, lipid particles, vesicles, and the like, are used for the introduction of the compositions of the present invention into suitable host cells/organisms. In particular, the compositions of the present invention may be formulated for delivery either encapsulated in a lipid particle, a liposome, a vesicle, a nanosphere, or a nanoparticle or the like. Alternatively, compositions of the present invention can be bound, either covalently or non-covalently, to the surface of such carrier vehicles:

[0267] The formation and use of liposome and liposome-like preparations as potential drug carriers is generally known to those of skill in the art (see for example, Lasic, Trends Biotechnol July 1998;16(7):307-21; Takakura, Nippon Rinsho March 1998;56(3):691-5; Chandran et al., Indian J Exp Biol. August 1997:35(8):801-9; Margalit, Crit Rev Ther Drug Carrier Syst. 1995;12(2-3):233-61; U.S. Pat. No. 5,567,434; U.S. Pat. No. 5,552,157; U.S. Pat. No. 5,565,213; U.S. Pat. No. 5,738,868 and U.S. Pat. No. 5,795,587, each specifically incorporated herein by reference in its entirety).

[0268] Liposomes have been used successfully with a number of cell types that are normally difficult to transfect by other procedures, including T cell suspensions, primary hepatocyte cultures and PC 12 cells (Renneisen et al., J Biol Chem. Sep. 25, 1990;265(27):16337-42; Muller et al., DNA Cell Biol. Apr. 1990;9(3):221-9). In addition, liposomes are free of the DNA length constraints that are typical of viral-based delivery systems. Liposomes have been used effectively to introduce genes, various drugs, radiotherapeutic agents, enzymes, viruses, transcription factors, allosteric effectors and the like, into a variety of cultured cell lines and animals. Furthermore, he use of liposomes does not appear to be associated with autoimmune responses or unacceptable toxicity after systemic delivery.

[0269] In certain embodiments, liposomes are formed from phospholipids that are dispersed in an aqueous medium and spontaneously form multilamellar concentric bilayer vesicles (also termed multilamellar vesicles (MLVs).

[0270] Alternatively, in other embodiments, the invention provides for pharmaceutically-acceptable nanocapsule formulations of the compositions of the present invention. Nanocapsules can generally entrap compounds in a stable and reproducible way (see, for example, Quintanar-Guerrero et al., Drug Dev Ind Pharm. December 1998;24(12):1113-28). To avoid side effects due to intracellular polymeric overloading, such ultrafine particles (sized around 0.1 μm) may be designed using polymers able to be degraded in vivo. Such particles can be made as described, for example, by Couvreur et al., Crit Rev Ther Drug Carrier Syst. 1988;5(1):1-20; zur Muhlen et al., Eur J Pharm Biopharm. March 1998;45(2):149-55; Zambaux et al. J Controlled Release. Jan. 2, 1998;50(1-3):31-40; and U.S. Pat. No. 5,145,684.

[0271] Cancer Therapeutic Methods

[0272] Immunologic approaches to cancer therapy are based on the recognition that cancer cells can often evade the body's defenses against aberrant or foreign cells and molecules, and that these defenses might be therapeutically stimulated to regain the lost ground, e.g. pgs. 623-648 in Klein, Immunology (Wiley-Interscience, New York, 1982). Numerous recent observations that various immune effectors can directly or indirectly inhibit growth of tumors has led to renewed interest in this approach to cancer therapy, e.g. Jager, et al., Oncology 2001;60(1):1-7; Renner, et al., Ann Hematol December 2000;79(12):651-9.

[0273] Four-basic cell types whose function has been associated with antitumor cell immunity and the elimination of tumor cells from the body are: i) B-lymphocytes which secrete immunoglobulins into the blood plasma for identifying and labeling the nonself invader cells; ii) monocytes which secrete the complement proteins that are responsible for lysing and processing the immunoglobulin-coated target invader cells; iii) natural killer lymphocytes having two mechanisms for the destruction of tumor cells, antibody-dependent cellular cytotoxicity and natural killing; and iv) T-lymphocytes possessing antigen-specific receptors and having the capacity to recognize a tumor cell carrying complementary marker molecules (Schreiber, H., 1989, in Fundamental Immunology (ed). W. E. Paul, pp. 923-955).

[0274] Cancer immunotherapy generally focuses on inducing humoral immune responses, cellular immune responses, or both. Moreover, it is well established that induction of CD4⁺ T helper cells is necessary in order to secondarily induce either antibodies or cytotoxic CD8⁺ T cells. Polypeptide antigens that are selective or ideally specific for cancer cells, particularly colon cancer cells, offer a powerful approach for inducing immune responses against colon cancer, and are an important aspect of the present invention.

[0275] Therefore, in further aspects of the present invention, the pharmaceutical compositions described herein may be used to stimulate an immune response against cancer, particularly for the immunotherapy of colon cancer. Within such methods, the pharmaceutical compositions described herein are administered to a patient, typically a warm-blooded animal, preferably a human. A patient may or may not be afflicted with cancer. Pharmaceutical compositions and vaccines may be administered either prior to or following surgical removal of primary tumors and/or treatment such as administration of radiotherapy or conventional chemotherapeutic drugs. As discussed above, administration of the pharmaceutical compositions may be by any suitable method, including administration by intravenous, intraperitoneal, intramuscular, subcutaneous, intranasal, intradermal, anal, vaginal, topical and oral routes.

[0276] Within certain embodiments, immunotherapy may be active immunotherapy, in which treatment relies on the in vivo stimulation of the endogenous host immune system to react against tumors with the administration of immune response-modifying agents (such as polypeptides and polynucleotides as provided herein).

[0277] Within other embodiments, immunotherapy may be passive immunotherapy, in which treatment involves the delivery of agents with established tumor-immune reactivity (such as effector cells or antibodies) that can directly or indirectly mediate antitumor effects and does not necessarily depend on an intact host immune system. Examples of effector cells include T cells as discussed above, T lymphocytes (such as CD8⁺ cytotoxic T lymphocytes and CD4⁺ T-helper tumor-infiltrating lymphocytes), killer cells (such as Natural Killer cells and lymphokine-activated killer cells), B cells and antigen-presenting cells (such as dendritic cells and macrophages) expressing a polypeptide provided herein. T cell receptors and antibody receptors specific for the polypeptides recited herein may be cloned, expressed and transferred into other vectors or effector cells for adoptive immunotherapy. The polypeptides provided herein may also be used to generate antibodies or anti-idiotypic antibodies (as described above and in U.S. Pat. No. 4,918,164) for passive immunotherapy.

[0278] Monoclonal antibodies may be labeled with any of a variety of labels for desired selective usages in detection, diagnostic assays or therapeutic applications (as described in U.S. Pat. Nos. 6,090,365; 6,015,542; 5,843,398; 5,595,721; and 4,708,930, hereby incorporated by reference in their entirety as if each was incorporated individually). In each case, the binding of the labelled monoclonal antibody to the determinant site of the antigen will signal detection or delivery of a particular therapeutic agent to the antigenic determinant on the non-normal cell. A further object of this invention is to provide the specific monoclonal antibody suitably labelled for achieving such desired selective usages thereof.

[0279] Effector cells may generally be obtained in sufficient quantities for adoptive immunotherapy by growth in vitro, as described herein. Culture conditions for expanding single antigen-specific effector cells to several billion in number with retention of antigen recognition in vivo are well known in the art. Such in vitro culture conditions typically use intermittent stimulation with antigen, often in the presence of cytokines (such as IL-2) and non-dividing feeder cells. As noted above, immunoreactive polypeptides as provided herein may be used to rapidly expand antigen-specific T cell cultures in order to generate a sufficient number of cells for immunotherapy. In particular, antigen-presenting cells, such as dendritic, macrophage, monocyte, fibroblast and/or B cells, may be pulsed with immunoreactive polypeptides or transfected with one or more polynucleotides using standard techniques well known in the art. For example, antigen-presenting cells can be transfected with a polynucleotide having a promoter appropriate for increasing expression in a recombinant virus or other expression system. Cultured effector cells for use in therapy must be able to grow and distribute widely, and to survive long term in vivo. Studies have shown that cultured effector cells can be induced to grow in vivo and to survive long term in substantial numbers by repeated stimulation with antigen supplemented with IL-2 (see, for example, Cheever et al., Immunological Reviews 157:177, 1997).

[0280] Alternatively, a vector expressing a polypeptide recited herein may be introduced into antigen presenting cells taken from a patient and clonally propagated ex vivo for transplant back into the same patient. Transfected cells may be reintroduced into the patient using any means known in the art, preferably in sterile form by intravenous, intracavitary, intraperitoneal or intratumor administration.

[0281] Routes and frequency of administration of the therapeutic compositions described herein, as well as dosage, will vary from individual to individual, and may be readily established using standard techniques. In general, the pharmaceutical compositions and vaccines may be administered by injection (e.g., intracutaneous, intramuscular, intravenous or subcutaneous), intranasally (e.g., by aspiration) or orally. Preferably, between 1 and 10 doses may be administered over a 52 week period. Preferably, 6 doses are administered, at intervals of 1 month, and booster vaccinations may be given periodically thereafter. Alternate protocols may be appropriate for individual patients. A suitable dose is an amount of a compound that, when administered as described above, is capable of promoting an anti-tumor immune response, and is at least 10-50% above the basal (i.e., untreated) level. Such response can be monitored by measuring the anti-tumor antibodies in a patient or by vaccine-dependent generation of cytolytic effector cells capable of killing the patient's tumor cells in vitro. Such vaccines should also be capable of causing an immune response that leads to an improved clinical outcome (e.g., more frequent remissions, complete or partial or longer disease-free survival) in vaccinated patients as compared to non-vaccinated patients. In general, for pharmaceutical compositions and vaccines comprising one or more polypeptides, the amount of each polypeptide present in a dose ranges from about 25 μg to 5 μg per kg of host. Suitable dose sizes will vary with the size of the patient, but will typically range from about 0.1 mL to about 5 mL.

[0282] In general, an appropriate dosage and treatment regimen provides the active compound(s) in an amount sufficient to provide therapeutic and/or prophylactic benefit. Such a response can be monitored by establishing an improved clinical outcome (e.g., more frequent remissions, complete or partial, or longer disease-free survival) in treated patients as compared to non-treated patients. Increases in preexisting immune responses to a tumor protein generally correlate with an improved clinical outcome. Such immune responses may generally be evaluated using standard proliferation, cytotoxicity or cytokine assays, which may be performed using samples obtained from a patient before and after treatment.

[0283] Cancer Detection and Diagnostic Compositions, Methods and Kits

[0284] In general, a cancer may be detected in a patient based on the presence of one or more colon tumor proteins and/or polynucleotides encoding such proteins in a biological sample (for example, blood, sera, sputum urine and/or tumor biopsies) obtained from the patient. In other words, such proteins may be used as markers to indicate the presence or absence of a cancer such as colon cancer. In addition, such proteins may be useful for the detection of other cancers. The binding agents provided herein generally permit detection of the level of antigen that binds to the agent in the biological sample.

[0285] Polynucleotide primers and probes may be used to detect the level of mRNA encoding a tumor protein, which is also indicative of the presence or absence of a cancer. In general, a tumor sequence should be present at a level that is at least two-fold, preferably three-fold, and more preferably five-fold or higher in tumor tissue than in normal tissue of the same type from which the tumor arose. Expression levels of a particular tumor sequence in tissue types different from that in which the tumor arose are irrelevant in certain diagnostic embodiments since the presence of tumor cells can be confirmed by observation of predetermined differential expression levels, e.g., 2-fold, 5-fold, etc, in tumor tissue to expression levels in normal tissue of the same type.

[0286] Other differential expression patterns can be utilized advantageously for diagnostic purposes. For example, in one aspect of the invention, overexpression of a tumor sequence in tumor tissue and normal tissue of the same type, but not in other normal tissue types, e.g. PBMCs, can be exploited diagnostically. In this case, the presence of metastatic tumor cells, for example in a sample taken from the circulation or some other tissue site different from that in which the tumor arose, can be identified and/or confirmed by detecting expression of the tumor sequence in the sample, for example using RT-PCR analysis. In many instances, it will be desired to enrich for tumor cells in the sample of interest, e.g., PBMCs, using cell capture or other like techniques.

[0287] There are a variety of assay formats known to those of ordinary skill in the art for using a binding agent to detect polypeptide markers in a sample. See, e.g., Harlow and Lane, Antibodies: A Laboratory Manual, Cold Spring Harbor Laboratory, 1988. In general, the presence or absence of a cancer in a patient may be determined by (a) contacting a biological sample obtained from a patient with a binding agent; (b) detecting in the sample a level of polypeptide that binds to the binding agent; and (c) comparing the level of polypeptide with a predetermined cut-off value.

[0288] In a preferred embodiment, the assay involves the use of binding agent immobilized on a solid support to bind to and remove the polypeptide from the remainder of the sample. The bound polypeptide may then be detected using a detection reagent that contains a reporter group and specifically binds to the binding agent/polypeptide complex. Such detection reagents may comprise, for example, a binding agent that specifically binds to the polypeptide or an antibody or other agent that specifically binds to the binding agent, such as an anti-immunoglobulin, protein G, protein A or a lectin. Alternatively, a competitive assay may be utilized, in which a polypeptide is labeled with a reporter group and allowed to bind to the immobilized binding agent after incubation of the binding agent with the sample. The extent to which components of the sample inhibit the binding of the labeled polypeptide to the binding agent is indicative of the reactivity of the sample with the immobilized binding agent. Suitable polypeptides for use within such assays include full length colon tumor proteins and polypeptide portions thereof to which the binding agent binds, as described above.

[0289] The solid support may be any material known to those of ordinary skill in the art to which the tumor protein may be attached. For example, the solid support may be a test well in a microtiter plate or a nitrocellulose or other suitable membrane. Alternatively, the support may be a bead or disc, such as glass, fiberglass, latex or a plastic material such as polystyrene or polyvinylchloride. The support may also be a magnetic particle or a fiber optic sensor, such as those disclosed, for example, in U.S. Pat. No. 5,359,681. The binding agent may be immobilized on the solid support using a variety of techniques known to those of skill in the art, which are amply described in the patent and scientific literature. In the context of the present invention, the term “immobilization” refers to both noncovalent association, such as adsorption, and covalent attachment (which may be a direct linkage between the agent and functional groups on the support or may be a linkage by way of a cross-linking agent). Immobilization by adsorption to a well in a microtiter plate or to a membrane is preferred. In such cases, adsorption may be achieved by contacting the binding agent, in a suitable buffer, with the solid support for a suitable amount of time. The contact time varies with temperature, but is typically between about 1 hour and about 1 day. In general, contacting a well of a plastic microtiter plate (such as polystyrene or polyvinylchloride) with an amount of binding agent ranging from about 10 ng to about 10 μg, and preferably about 100 ng to about 1 μg, is sufficient to immobilize an adequate amount of binding agent.

[0290] Covalent attachment of binding agent to a solid support may generally be achieved by first reacting the support with a bifunctional reagent that will react with both the support and a functional group, such as a hydroxyl or amino group, on the binding agent. For example, the binding agent may be covalently attached to supports having an appropriate polymer coating using benzoquinone or by condensation of an aldehyde group on the support with an amine and an active hydrogen on the binding partner (see, e.g., Pierce Immunotechnology Catalog and Handbook, 1991, at A12-A13).

[0291] In certain embodiments, the assay is a two-antibody sandwich assay. This assay may be performed by first contacting an antibody that has been immobilized on a solid support, commonly the well of a microtiter plate, with the sample, such that polypeptides within the sample are allowed to bind to the immobilized antibody. Unbound sample is then removed from the immobilized polypeptide-antibody complexes and a detection reagent (preferably a second antibody capable of binding to a different site on the polypeptide) containing a reporter group is added. The amount of detection reagent that remains bound to the solid support is then determined using a method appropriate for the specific reporter group.

[0292] More specifically, once the antibody is immobilized on the support as described above, the remaining protein binding sites on the support are typically blocked. Any suitable blocking agent known to those of ordinary skill in the art, such as bovine serum albumin or Tween 20™ (Sigma Chemical Co., St. Louis, Mo.). The immobilized antibody is then incubated with the sample, and polypeptide is allowed to bind to the antibody. The sample may be diluted with a suitable diluent, such as phosphate-buffered saline (PBS) prior to incubation. In general, an appropriate contact time (i.e., incubation time) is a period of time that is sufficient to detect the presence of polypeptide within a sample obtained from an individual with colon cancer at least about 95% of that achieved at equilibrium between bound and unbound polypeptide. Those of ordinary skill in the art will recognize that the time necessary to achieve equilibrium may be readily determined by assaying the level of binding that occurs over a period of time. At room temperature, an incubation time of about 30 minutes is generally sufficient.

[0293] Unbound sample may then be removed by washing the solid support with an appropriate buffer, such as PBS containing 0.1% Tween 20™. The second antibody, which contains a reporter group, may then be added to the solid support. Preferred reporter groups include those groups recited above.

[0294] The detection reagent is then incubated with the immobilized antibody-polypeptide complex for an amount of time sufficient to detect the bound polypeptide. An appropriate amount of time may generally be determined by assaying the level of binding that occurs over a period of time. Unbound detection reagent is then removed and bound detection reagent is detected using the reporter group. The method employed for detecting the reporter group depends upon the nature of the reporter group. For radioactive groups, scintillation counting or autoradiographic methods are generally appropriate. Spectroscopic methods may be used to detect dyes, luminescent groups and fluorescent groups. Biotin may be detected using avidin, coupled to a different reporter group (commonly a radioactive or fluorescent group or an enzyme). Enzyme reporter groups may generally be detected by the addition of substrate (generally for a specific period of time), followed by spectroscopic or other analysis of the reaction products.

[0295] To determine the presence or absence of a cancer, such as colon cancer, the signal detected from the reporter group that remains bound to the solid support is generally compared to a signal that corresponds to a predetermined cut-off value. In one preferred embodiment, the cut-off value for the detection of a cancer is the average mean signal obtained when the immobilized antibody is incubated with samples from patients without the cancer. In general, a sample generating a signal that is three standard deviations above the predetermined cut-off value is considered positive for the cancer. In an alternate preferred embodiment, the cut-off value is determined using a Receiver Operator Curve, according to the method of Sackett et al., Clinical Epidemiology: A Basic Science for Clinical Medicine, Little Brown and Co., 1985, p. 106-7. Briefly, in this embodiment, the cut-off value may be determined from a plot of pairs of true positive rates (i.e., sensitivity) and false positive rates (100%-specificity) that correspond to each possible cut-off value for the diagnostic test result. The cut-off value on the plot that is the closest to the upper left-hand corner (i.e., the value that encloses the largest area) is the most accurate cut-off value, and a sample generating a signal that is higher than the cut-off value determined by this method may be considered positive. Alternatively, the cut-off value may be shifted to the left along the plot, to minimize the false positive rate, or to the right, to minimize the false negative rate. In general, a sample generating a signal that is higher than the cut-off value determined by this method is considered positive for a cancer.

[0296] In a related embodiment, the assay is performed in a flow-through or strip test format, wherein the binding agent is immobilized on a membrane, such as nitrocellulose. In the flow-through test, polypeptides within the sample bind to the immobilized binding agent as the sample passes through the membrane. A second, labeled binding agent then binds to the binding agent-polypeptide complex as a solution containing the second binding agent flows through the membrane. The detection of bound second binding agent may then be performed as described above. In the strip test format, one end of the membrane to which binding agent is bound is immersed in a solution containing the sample. The sample migrates along the membrane through a region containing second binding agent and to the area of immobilized binding agent. Concentration of second binding agent at the area of immobilized antibody indicates the presence of a cancer. Typically, the concentration of second binding agent at that site generates a pattern, such as a line, that can be read visually. The absence of such a pattern indicates a negative result. In general, the amount of binding agent immobilized on the membrane is selected to generate a visually discernible pattern when the biological sample contains a level of polypeptide that would be sufficient to generate a positive signal in the two-antibody sandwich assay, in the format discussed above. Preferred binding agents for use in such assays are antibodies and antigen-binding fragments thereof. Preferably, the amount of antibody immobilized on the membrane ranges from about 25 ng to about 1 μg, and more preferably from about 50 ng to about 500 ng. Such tests can typically be performed with a very small amount of biological sample.

[0297] Of course, numerous other assay protocols exist that are suitable for use with the tumor proteins or binding agents of the present invention. The above descriptions are intended to be exemplary only. For example, it will be apparent to those of ordinary skill in the art that the above protocols may be readily modified to use tumor polypeptides to detect antibodies that bind to such polypeptides in a biological sample. The detection of such tumor protein specific antibodies may correlate with the presence of a cancer.

[0298] A cancer may also, or alternatively, be detected based on the presence of T cells that specifically react with a tumor protein in a biological sample. Within certain methods, a biological sample comprising CD4⁺ and/or CD8⁺ T cells isolated from a patient is incubated with a tumor polypeptide, a polynucleotide encoding such a polypeptide and/or an APC that expresses at least an immunogenic portion of such a polypeptide, and the presence or absence of specific activation of the T cells is detected. Suitable biological samples include, but are not limited to, isolated T cells. For example, T cells may be isolated from a patient by routine techniques (such as by Ficoll/Hypaque density gradient centrifugation of peripheral blood lymphocytes). T cells may be incubated in vitro for 2-9 days (typically 4 days) at 37° C. with polypeptide (e.g., 5-25 μg/ml). It may be desirable to incubate another aliquot of a T cell sample in the absence of tumor polypeptide to serve as a control. For CD4⁺ T cells, activation is preferably detected by evaluating proliferation of the T cells. For CD8⁺ T cells, activation is preferably detected by evaluating cytolytic activity. A level of proliferation that is at least two fold greater and/or a level of cytolytic activity that is at least 20% greater than in disease-free patients indicates the presence of a cancer in the patient.

[0299] As noted above, a cancer may also, or alternatively, be detected based on the level of mRNA encoding a tumor protein in a biological sample. For example, at least two oligonucleotide primers may be employed in a polymerase chain reaction (PCR) based assay to amplify a portion of a tumor cDNA derived from a biological sample, wherein at least one of the oligonucleotide primers is specific for (i.e., hybridizes to) a polynucleotide encoding the tumor protein. The amplified cDNA is then separated and detected using techniques well known in the art, such as gel electrophoresis.

[0300] Similarly, oligonucleotide probes that specifically hybridize to a polynucleotide encoding a tumor protein may be used in a hybridization assay to detect the presence of polynucleotide encoding the tumor protein in a biological sample.

[0301] To permit hybridization under assay conditions, oligonucleotide primers and probes should comprise an oligonucleotide sequence that has at least about 60%, preferably at least about 75% and more preferably at least about 90%, identity to a portion of a polynucleotide encoding a tumor protein of the invention that is at least 10 nucleotides, and preferably at least 20 nucleotides, in length. Preferably, oligonucleotide primers and/or probes hybridize to a polynucleotide encoding a polypeptide described herein under moderately stringent conditions, as defined above. Oligonucleotide primers and/or probes which may be usefully employed in the diagnostic methods described herein preferably are at least 10-40 nucleotides in length. In a preferred embodiment, the oligonucleotide primers comprise at least 10 contiguous nucleotides, more preferably at least 15 contiguous nucleotides, of a DNA molecule having a sequence as disclosed herein. Techniques for both PCR based assays and hybridization assays are well known in the art (see, for example, Mullis et al., Cold Spring Harbor Symp. Quant. Biol., 51:263, 1987; Erlich ed., PCR Technology, Stockton Press, NY, 1989).

[0302] One preferred assay employs RT-PCR, in which PCR is applied in conjunction with reverse transcription. Typically, RNA is extracted from a biological sample, such as biopsy tissue, and is reverse transcribed to produce cDNA molecules. PCR amplification using at least one specific primer generates a cDNA molecule, which may be separated and visualized using, for example, gel electrophoresis. Amplification may be performed on biological samples taken from a test patient and from an individual who is not afflicted with a cancer. The amplification reaction may be performed on several dilutions of cDNA spanning two orders of magnitude. A two-fold or greater increase in expression in several dilutions of the test patient sample as compared to the same dilutions of the non-cancerous sample is typically considered positive.

[0303] In another aspect of the present invention, cell capture technologies may be used in conjunction, with, for example, real-time PCR to provide a more sensitive tool for detection of metastatic cells expressing colon tumor antigens. Detection of colon cancer cells in biological samples, e.g., bone marrow samples, peripheral blood, and small needle aspiration samples is desirable for diagnosis and prognosis in colon cancer patients.

[0304] Immunomagnetic beads coated with specific monoclonal antibodies to surface cell markers, or tetrameric antibody complexes, may be used to first enrich or positively select cancer cells in a sample. Various commercially available kits may be used, including Dynabeads® Epithelial Enrich (Dynal Biotech, Oslo, Norway), StemSep™ (StemCell Technologies, Inc., Vancouver, BC), and RosetteSep (StemCell Technologies). A skilled artisan will recognize that other methodologies and kits may also be used to enrich or positively select desired cell populations. Dynabeads® Epithelial Enrich contains magnetic beads coated with mAbs specific for two glycoprotein membrane antigens expressed on normal and neoplastic epithelial tissues. The coated beads may be added to a sample and the sample then applied to a magnet, thereby capturing the cells bound to the beads. The unwanted cells are washed away and the magnetically isolated cells eluted from the beads and used in further analyses.

[0305] RosetteSep can be used to enrich cells directly from a blood sample and consists of a cocktail of tetrameric antibodies that targets a variety of unwanted cells and crosslinks them to glycophorin A on red blood cells (RBC) present in the sample, forming rosettes. When centrifuged over Ficoll, targeted cells pellet along with the free RBC. The combination of antibodies in the depletion cocktail determines which cells will be removed and consequently which cells will be recovered. Antibodies that are available include, but are not limited to: CD2, CD3, CD4, CD5, CD8, CD10, CD11 b, CD14, CD15, CD16, CD19, CD20, CD24, CD25, CD29, CD33, CD34, CD36, CD38, CD41, CD45, CD45RA, CD45RO, CD56, CD66B, CD66e, HLA-DR, IgE, and TCRαβ.

[0306] Additionally, it is contemplated in the present invention that mAbs specific for colon tumor antigens can be generated and used in a similar manner. For example, mAbs that bind to tumor-specific cell surface antigens may be conjugated to magnetic beads, or formulated in a tetrameric antibody complex, and used to enrich or positively select metastatic colon tumor cells from a sample. Once a sample is enriched or positively selected, cells may be lysed and RNA isolated. RNA may then be subjected to RT-PCR analysis using colon tumor-specific primers in a real-time PCR assay as described herein. One skilled in the art will recognize that enriched or selected populations of cells may be analyzed by other methods (e.g. in situ hybridization or flow cytometry).

[0307] In another embodiment, the compositions described herein may be used as markers for the progression of cancer. In this embodiment, assays as described above for the diagnosis of a cancer may be performed over time, and the change in the level of reactive polypeptide(s) or polynucleotide(s) evaluated. For example, the assays may be performed every 24-72 hours for a period of 6 months to 1 year, and thereafter performed as needed. In general, a cancer is progressing in those patients in whom the level of polypeptide or polynucleotide detected increases over time. In contrast, the cancer is not progressing when the level of reactive polypeptide or polynucleotide either remains constant or decreases with time.

[0308] Certain in vivo diagnostic assays may be performed directly on a tumor. One such assay involves contacting tumor cells with a binding agent. The bound binding agent may then be detected directly or indirectly via a reporter group. Such binding agents may also be used in histological applications. Alternatively, polynucleotide probes may be used within such applications.

[0309] As noted above, to improve sensitivity, multiple tumor protein markers may be assayed within a given sample. It will be apparent that binding agents specific for different proteins provided herein may be combined within a single assay. Further, multiple primers or probes may be used concurrently. The selection of tumor protein markers may be based on routine experiments to determine combinations that results in optimal sensitivity. In addition, or alternatively, assays for tumor proteins provided herein may be combined with assays for other known tumor antigens.

[0310] The present invention further provides kits for use within any of the above diagnostic methods. Such kits typically comprise two or more components necessary for performing a diagnostic assay. Components may be compounds, reagents, containers and/or equipment. For example, one container within a kit may contain a monoclonal antibody or fragment thereof that specifically binds to a tumor protein. Such antibodies or fragments may be provided attached to a support material, as described above. One or more additional containers may enclose elements, such as reagents or buffers, to be used in the assay. Such kits may also, or alternatively, contain a detection reagent as described above that contains a reporter group suitable for direct or indirect detection of antibody binding.

[0311] Alternatively, a kit may be designed to detect the level of mRNA encoding a tumor protein in a biological sample. Such kits generally comprise at least one oligonucleotide probe or primer, as described above, that hybridizes to a polynucleotide encoding a tumor protein. Such an oligonucleotide may be used, for example, within a PCR or hybridization assay. Additional components that may be present within such kits include a second oligonucleotide and/or a diagnostic reagent or container to facilitate the detection of a polynucleotide encoding a tumor protein.

[0312] The following Examples are offered by way of illustration and not by way of limitation.

### EXAMPLES

### Example 1

[0313] Identification of Colon Tumor Protein cDNAs

[0314] This Example illustrates the identification of cDNA molecules encoding colon tumor proteins using PCR-based cDNA subtraction methodology.

[0315] A pool of tester mRNA was collected from three colon adenocarcinoma samples showing moderate histological differentiation and no evidence of metastasis. Eight normal tissues, including brain, pancreas, bone marrow, liver, heart, lung, stomach and small intestine were represented in the driver mRNA pool. cDNA synthesis, hybridization and PCR amplification were performed according to the methods of Clontech (Palo Alto, Calif.), with minor modifications. In a first subtraction, the restriction enzymes PvuII, Dral, Mscl and Stul were used to digest cDNAs. The tester to driver ratio was 1:40. In a second subtraction, Dral, Mscl and Stul were used for cDNA digestion. A tester to driver ratio of 1:76 was employed. Following the PCR amplification steps, the cDNAs were cloned into the pCR2.1 plasmid vector. The libraries resulting from the first

[0316] The ends were then filled in, and PCR amplification was performed using adaptor-specific primers. Only population (e), which contained tester cDNA that did not hybridize to driver cDNA, was amplified exponentially. A second PCR amplification step was then performed, to reduce background and further enrich differentially expressed sequences.

[0317] This PCR-based subtraction technique normalizes differentially expressed cDNAs so that rare transcripts that are over-expressed in colon tumor tissue may be recoverable. Such transcripts would be difficult to recover by traditional subtraction methods.

[0318] To characterize the complexity and redundancy of the subtracted library, 96 clones were randomly picked and 65 were sequenced, as previously described. These sequences were further characterized by comparison with the most recent Genbank database (April, 1998) to determine their degree of novelty. No significant homologies were found to 21 of these clones, hereinafter referred to as 11092, 11093, 11096, 11098, 11103, 11174, 11108, 11112, 11115, 11117, 11118, 11134, 11151, 11154, 11158, 11168, 11172, 11175, 11184, 11185 and 11187. The determined cDNA sequences for these clones are provided in SEQ ID NO: 48, 49, 52, 54, 59, 60, 65-69, 79, 89, 90, 93, 99-101 and 109-111, respectively.

[0319] Two-thousand clones from the above mentioned cDNA subtraction library were randomly picked and submitted to a round of PCR amplification. Briefly, 0.5 μl of glycerol stock solution was added to 99.5 μl of pcr MIX (80 μl H₂O, 10 μl 10× PCR Buffer, 6 μl 25 mM MgCl₂, 1 μl 10 mM dNTPs, 1 μl 100 mM M13 forward primer(CACGACGTTGTAAAACGACGG), 1 μl 100 mM M13 reverse primer (CACAGGAAACAGCTATGACC)), and 0.5 μl 5 μl/ml Taq polymerase (primers provided by (Operon Technologies, Alameda, Calif.). The PCR amplification was run for thirty cycles under the following conditions: 95° C. for 5 min., 92° C. for 30 sec., 57° C. for 40 sec., 75° C. for 2 min. and 75° C. for 5 minutes.

[0320] mRNA expression levels for representative clones were determined using microarray technology (Synteni, Palo Alto, Calif.) in colon tumor tissues (n=25), normal colon tissues (n=6), kidney, lung, liver, brain, heart, esophagus, small intestine, stomach, pancreas, adrenal gland, salivary gland, resting PBMC, activated PBMC, bone marrow, dendritic cells, spinal cord, blood vessels, skeletal muscle, skin, breast and fetal tissues. The number of tissue samples tested in each case was one (n=1), except where specifically noted above; additionally, all the above-mentioned tissues were derived from humans. The PCR amplification products were dotted onto slides in an array format, with each product occupying a unique location in the array. mRNA was extracted from the tissue sample to be tested, and fluorescent-labeled cDNA probes were generated by reverse transcription according to the protocol provided by Synteni. The microarrays were probed with the labeled cDNA probes, the slides scanned, and fluorescence intensity was measured. This intensity correlates with the hybridization intensity.

[0321] Clones corresponding to SEQ ID NOs: 1506-1556 were overexpressed in colon tumors and showed low or no expression levels in normal tissues.

### Example 2

[0322] Analysis of cDNA Expression of Colon Tumor Antigen C1648P using Real-Time PCR

[0323] cDNA expression levels of the colon tumor antigen, C1648P (SEQ ID NO: 1198), was further analyzed by real-time PCR. The first-strand cDNA used in the quantitative real-time PCR was synthesized from 20 μg of total RNA that was treated with DNase I (Amplification Grade, Gibco BRL Life Technology, Gaithersburg, Md.), using Superscript Reverse Transcriptase (RT) (Gibco BRL Life Technology, Gaithersburg, Md.). Real-time PCR was performed with a GeneAmp™ 5700 sequence detection system (PE Biosystems, Foster City, Calif.). The 5700 system uses SYBR™ green, a fluorescent dye that only intercalates into double stranded DNA, and a set of gene-specific forward and reverse primers. The increase in fluorescence was monitored during the whole amplification process. The optimal concentration of primers was determined using a checkerboard approach and a pool of cDNAs from tumors was used in this process. The PCR reaction was performed in 25 ˜l volumes that included 2.5 μl of SYBR green buffer, 2 μl of cDNA template and 2.5 μl each of the forward and reverse primers for the gene of interest. The cDNAs used for RT reactions were diluted 1:10 for each gene of interest and 1:100 for the β-actin control. In order to quantitate the amount of specific cDNA (and hence initial mRNA) in the sample, a standard curve was generated for each run using the plasmid DNA containing the gene of interest. Standard curves were generated using the Ct values determined in the real-time PCR which were related to the initial cDNA concentration used in the assay. Standard dilution ranging from 20-2×10⁶ copies of the gene of interest was used for this purpose. Expression levels of the gene of interest were normalized against the expression of the gene in normal bone marrow.

[0324] The real-time PCR and Genbank search results are shown below in Table 2. The results indicate that C1648P is overexpressed in 30% of colon tumors versus normal tissues and thus this antigen may have immunotherapeutic and/or diagnostic applications in colon cancer.

TABLE 2
Real-Time PCR and GenBank Search Results for C1648P

| | cDNA | | |
|---|---|---|---|
| Candidate | SEQ | | |
| Name | ID NO: | Genbank Search Results | Expression Profile |
| C1648P | 1198 | Chromosome 17 genomic | Extended and proble- |
| | | sequence, lies between | matic panels show 2-5 |
| | | HoxB7 and HoxB6 | fold overexpression in |
| | | | 30% of colon tumors vs. |
| | | | normal tissues. Some |
| | | | expression in brain, |
| | | | kidney, liver, adrenal |
| | | | gland. |

*E = Extended Panel;
P = Problematic Panel

### Example 3

[0325] Full Length cDNA and Protein Sequences of HoxB6, HoxB7, and HoxB9

[0326] C1648P is a colon candidate that maps to human chromosome 17 between the string of Hox genes. Our initial sequence isolates for C1648P do not match any previously known genes. Real time performed on C1648P as described in Example 2 indicates good colon tumor overexpression profiles. To determine if the adjacent Hox coding sequences have a similar or distinct expression profile to C1648P, real time will be performed on the HoxB6, HoxB7 and HoxB9 genes. Disclosed herein are the full length cDNA (SEQ ID NOs: 1557-1559) and protein sequences (SEQ ID NOs: 1560-1562) for the HoxB6, HoxB7, and HoxB9 genes.

### Example 4

[0327] Peptide Priming of T-Helper Lines

[0328] Generation of CD4⁺ T helper lines and identification of peptide epitopes derived from tumor-specific antigens that are capable of being recognized by CD4⁺ T cells in the context of HLA class II molecules, is carried out as follows:

[0329] Fifteen-mer peptides overlapping by 10 amino acids, derived from a tumor-specific antigen, are generated using standard procedures. Dendritic cells (DC) are derived from PBMC of a normal donor using GM-CSF and IL-4 by standard protocols. CD4⁺ T cells are generated from the same donor as the DC using MACS beads (Miltenyi Biotec, Auburn, Calif.) and negative selection. DC are pulsed overnight with pools of the 15-mer peptides, with each peptide at a final concentration of 0.25 μg/ml. Pulsed DC are washed and plated at 1×10⁴ cells/well of 96-well V-bottom plates and purified CD4⁺ T cells are added at 1×10⁵/well. Cultures are supplemented with 60 ng/ml IL-6 and 10 ng/ml IL-12 and incubated at 37° C. Cultures are restimulated as above on a weekly basis using DC generated and pulsed as above as antigen presenting cells, supplemented with 5 ng/ml IL-7 and 10 U/ml IL-2. Following 4 in vitro stimulation cycles, resulting CD4⁺ T cell lines (each line corresponding to one well) are tested for specific proliferation and cytokine production in response to the stimulating pools of peptide with an irrelevant pool of peptides used as a control.

### Example 5

[0330] Generation of Tumor-Specific CTL Lines using in Vitro Whole-Gene Priming

[0331] Using in vitro whole-gene priming with tumor antigen-vaccinia infected DC (see, for example, Yee et al, The Journal of Immunology, 157(9):4079-86,1996), human CTL lines are derived that specifically recognize autologous fibroblasts transduced with a specific tumor antigen, as determined by interferon-γ ELISPOT analysis. Specifically, dendritic cells (DC) are differentiated from monocyte cultures derived from PBMC of normal human donors by growing for five days in RPMI medium containing 10% human serum, 50 ng/ml human GM-CSF and 30 ng/ml human IL-4. Following culture, DC are infected overnight with tumor antigen-recombinant vaccinia virus at a multiplicity of infection (M.O.I) of five, and matured overnight by the addition of 3 μg/ml CD40 ligand. Virus is then inactivated by UV irradiation. CD8+ T cells are isolated using a magnetic bead system, and priming cultures are initiated using standard culture techniques. Cultures are restimulated every 7-10 days using autologous primary fibroblasts retrovirally transduced with previously identified tumor antigens. Following four stimulation cycles, CD8+ T cell lines are identified that specifically produce interferon-y when stimulated with tumor antigen-transduced autologous fibroblasts. Using a panel of HLA-mismatched B-LCL lines transduced with a vector expressing a tumor antigen, and measuring interferon-y production by the CTL lines in an ELISPOT assay, the HLA restriction of the CTL lines is determined.

### Example 6

[0332] Generation and Characterization of Anti-Tumor Antigen Monoclonal Antibodies

[0333] Mouse monoclonal antibodies are raised against E. coli derived tumor antigen proteins as follows: Mice are immunized with Complete Freund's Adjuvant (CFA) containing 50 μg recombinant tumor protein, followed by a subsequent intraperitoneal boost with Incomplete Freund's Adjuvant (IFA) containing 10 μg recombinant protein. Three days prior to removal of the spleens, the mice are immunized intravenously with approximately 50 μg of soluble recombinant protein. The spleen of a mouse with a positive titer to the tumor antigen is removed, and a single-cell suspension made and used for fusion to SP2/O myeloma cells to generate B cell hybridomas. The supernatants from the hybrid clones are tested by ELISA for specificity to recombinant tumor protein, and epitope mapped using peptides that spanned the entire tumor protein sequence. The mAbs are also tested by flow cytometry for their ability to detect tumor protein on the surface of cells stably transfected with the cDNA encoding the tumor protein.

### Example 7

[0334] Synthesis of Polypeptides

[0335] Polypeptides are synthesized on a Perkin Elmer/Applied Biosystems Division 430A peptide synthesizer using FMOC chemistry with HPTU (O-Benzotriazole-N,N,N′,N′-tetramethyluronium hexafluorophosphate) activation. A Gly-Cys-Gly sequence is attached to the amino terminus of the peptide to provide a method of conjugation, binding to an immobilized surface, or labeling of the peptide. Cleavage of the peptides from the solid support is carried out using the following cleavage mixture: trifluoroacetic acid:ethanedithiol:thioanisole:water:phenol (40:1:2:2:3). After cleaving for 2 hours, the peptides are precipitated in cold methyl-t-butyl-ether. The peptide pellets are then dissolved in water containing 0.1% trifluoroacetic acid (TFA) and lyophilized prior to purification by C18 reverse phase HPLC. A gradient of 0%-60% acetonitrile (containing 0.1% TFA) in water (containing 0.1% TFA) is used to elute the peptides. Following lyophilization of the pure fractions, the peptides are characterized using electrospray or other types of mass spectrometry and by amino acid analysis.

[0336] From the foregoing it will be appreciated that, although specific embodiments of the invention have been described herein for purposes of illustration, various modifications may be made without deviating from the spirit and scope of the invention. Accordingly, the invention is not limited except as by the appended claims.

The application's sequence listing, which the Patent Office published only in electronic form, follows.

SEQUENCE LISTING (1562 sequences)

SEQ ID NO: 1 - DNA, 447 bp, Homo sapiens
  misc_feature 436: n = A,T,C or G
ccttgaccttttcagcaagtgggaaggtgtaatccgtctccacagacaaggccaggactcgtttgtacccgttgatgatagaatggggtactgatgcaacagttgggtagccaatctgcagacagacactggcaacattgcggacaccctccaggaagcgagaatgcagagtttcctctgtgatatcaagcacttcagggttgtagatgctgccattgtcgaacacctgctggatgaccagcccaaaggagaagggggagatgttgagcatgttcagcagcgtggcttcgctggctcccactttgtctccagtcttgatcagctgcacatcactcaggatttcaatggtgcccctggagattttagtggtgatacctaaagcctggaaaaaggaggtcttctcgggcccgagaccagtgttctgggctggcacagngacttcacatg

SEQ ID NO: 2 - DNA, 445 bp, Homo sapiens
  misc_feature 361: n = A,T,C or G
aaatatcaaggccacttaaaacaagactcagcaaaccaaagctatcacttctgcattaccctttgtcctcaattaactactttgaaaattacagccaagcaaaccacaaacattttaatggtttatgtttggatgatatgtctcctgcacatgcttccaccagaacaaaaaaggaaaaccaaagaagttcctttccacataaggcacaggacaaaattaatcccatttacatattcaaggcgaaaatgagtgttttcctggcttttgtttgtttcttttgctatcacatgtctatagattatagggactcaagcacattatccatgacagaaaattccactgttgtacaaaataaaattgntaattctaactttattcttatacaatttgcagaatagatttgaaatgattgctataggttttaatgttgataagaactggacta

SEQ ID NO: 3 - DNA, 444 bp, Homo sapiens
  misc_feature 273, 360, 413, 418, 435: n = A,T,C or G
aaatgcacagtctttgaatacctggttgattttatgtagcgacagaactgaatatgttgccgagagctttctgaactgcttgagaagagttgcaggttccatgggatttaatgtggactaccccaaaatgtaatgtgcattctgccttctaatcagaagacctattatgattccattaaaaaatatttgagctcagactgcccagtcccaagccaatgtgtgcttgctcggaccttgaataaacagggcatgatgatgagtatcaccaccaanatcgctatgcagatgacttgcaagctcggaggcgagctgtgggctgtggaaatcctgtaaggaccctgtcacattttttctattagnaattaataaatttattttacctcggccgcgaccacgctaagggcgaattctgnagatntccatcacactggcggncggtcgagc

SEQ ID NO: 4 - DNA, 407 bp, Homo sapiens
  misc_feature 47, 240, 363, 385: n = A,T,C or G
catttggccgcctccctaccgctccaagcccagccctcagccatggnatgccccctggatcaggccattggcctcctcgtggccatcttccacaagtactccggcagggagggtgacaagcacaccctgagcaagaaggagctgaaggagctgatccagaaggagctcaccattggctcgaagctgcaggatgctgaaattgcaaggctgatggaagacttggaccggaacaaggaccangaggtgaacttccaggagtatgtcaccttcctgggggccttggctttgatctacaatgaagccctcaagggctgaaaataaatagggaagatggagacaccctctgggggtcctctctgagtnaaatccagtggtgggcaattgnacaataaatcttttttggtcaa

SEQ ID NO: 5 - DNA, 220 bp, Homo sapiens
cctgagttggaattcaggaatctatcagggcgatacctctcccacactggctgggacatcagtgggctgttttcgaaatagccatctccactagagaagcccatgagcaccggcttgcctgagcgctgggccacgtcccactgcatcccaccgctctggtagagaaacagggcataggacctgctcccgtccgtggagaggatggcttggtaggtgttgc

SEQ ID NO: 6 - DNA, 446 bp, Homo sapiens
  misc_feature 180, 209, 324, 419: n = A,T,C or G
aaagaatcagcaaaatttcaaataaaaaattatgaaaatattatcctcattagttcatttagtcccatgaaattaattattttctctgcttgatcttggtggacagtttcatgaagctgtcagttagttcattaaagttttggaaattctcagacagtgcagtggtatcagaaacttgtnttcaagagtacaggtcagagtcttctttncttttctttttgagatggagtcttgctctgttgccagactggagtgcagtggtgcgatctgggctcactgcaatctccacctcccgggttcaagcgattctcctgcctcagcctnccgagtaactgggactacaggtgcgcgccaccaagcccagctcatttttgtatttttagtacagatggggtttcacgatgttggctaggatggcntcgatctctggtcagaggcttttctgg

SEQ ID NO: 7 - DNA, 450 bp, Homo sapiens
  misc_feature 154: n = A,T,C or G
aaactttggtttgaaaattgcagttacaaaacccaaatgagaggacacggacaaaaaagtaacaaaaagacagatgccctgaatcagacacatcgctaacaagcaagagatgaggagattccatttggtgttattccggcatagagcaagcggnaggctttgatgcagaagcttattgtagaattgttaagtgattttagtcgacaggatcacatacaaatcatttacaagccacaattagtttattatttacataagacatttctctttaaccaggttaattgtttttcttaaaatggcatagactcctctggttagtaagttttattatgcacctctttcaaaactgaggctcctcatggctgtgtgttggaacttttttacctcggccgcgaccacgctaagggcgaattctgcagatatccatcacacttggcggtcgctcgagct

SEQ ID NO: 8 - DNA, 305 bp, Homo sapiens
tcacagacttttataaccctttgatccctaccaacattaagtatgagtttggccctgccatctttattggctgggcagggtctgccctagtcatcctgggaggtgcactgctctcctgttcctgtcctgggaatgagagcaaggctgggtaccgtgcaccccgctcttaccctaagtccaactcttccaaggagtatgtgtgacctgggatctccttgccccagcctgacaggctatgggagtgtctagatgcctgaaagggcctggggctgagctcagcctgtgggcagggtgccggacaaagg

SEQ ID NO: 9 - DNA, 327 bp, Homo sapiens
  misc_feature 309, 310, 316: n = A,T,C or G
aaaaaaatccaaatgctggcattgtccagaaaaatttaacaggtttatttataattattataaagttgaaccgctgaaacttgttcactgaaacattttaacttgcattaatgctttacgtctccgcatttatattaaaaattcacacacaaatgaaaatggaaaaactgccaatacctgatttctgtcccctatttttccactcgcaatcatatacttaggtaccttttgaccccatggaaagaaaatatctaacgttcagaactaccaataacaggaagaagagaaatttttttttttttttttttnnaaaatnaaaggttcccc

SEQ ID NO: 10 - DNA, 452 bp, Homo sapiens
  misc_feature 134, 149, 162, 251, 254, 263, 272, 274, 275, 283, 289, 290,297, 304, 316, 319, 336, 337, 356, 359, 371, 386, 390, 400,410, 418, 428, 430, 433, 441, 442, 445, 451: n = A,T,C or G
ccagcagtgaacaggttgaggatgtgcgggtagatagataactttgggtctggtttgtgtctgtgttcatgtttgtttaagggatatgtgtgactgtgggtggggacgtgtgcttgtggggcacaggtggcggnccctgctggagcccngttgggcgcagcncctatgtacgacgggtgttctcagtgacctacctcccaggctcctctgcacctgcaaaggaacaggagtgagtcgtgactgacaggggnggntgagactanactaggtanannacttaccncgaganntcaatgngccgtcnccgtgatggatnggnttgccaaggtgaatcgnnaccggttttatacccaaangtnttaacctggccngcctttcacacatgnactncaataaccantttatattcnctaacggncttttacagntnaanacttttcnnctnacttgnc

SEQ ID NO: 11 - DNA, 304 bp, Homo sapiens
aaaaaaaaatagaaaataacaaatgttggctagaatgtggagaaattgtaaccattatggcattactggtgagaatataacatggtgcagctgctgtggaaaatatggcagttcctcaaaaaattaaacacagaattaccatatgatccaccaattccacctttaagtcaaagaaaaatcaaaaggaaaatttataagtatcttgagggccaggcgtggtggctcacgcctgtaatcccaacgcttctgaaggccaaggcgggttgattacttgaggtcaggaggtcgagaccagcctggacct

SEQ ID NO: 12 - DNA, 432 bp, Homo sapiens
  misc_feature 170, 239, 311, 398: n = A,T,C or G
ccatgaacatcatctccaaggagaagaaggagatcaagtggattggtctgcccaccaactcggctcaggaatgtcagaacttagaggtggaaagacagaggagacttgaaagaataaaacagaaacagtctcaacttcaagaacttattctacagcaaattgccttcaanaacctggtgcagagaaaccggcatgcggagcagcaggccagccggccaccgccacccaactcagtcatncacctgcccttcatcatcgtcaacaccagcaagaagacggtcatcgactgcagcatctccaatgacaaattngagtatctgtttaattttgacaacacatttgaaatccacgatgacatagaagtgctgaagcggatgggcatggcttgcgggctggantcggggagctgctctgtcgaagaccttaaaatgg

SEQ ID NO: 13 - DNA, 133 bp, Homo sapiens
ccagactgcgttccgacaggcagcacaccgcctcgtagcagccgcgcaccgggctcagcgccttcatgctggggagtgagtccagaggtgccccaaagagaaagaaaaccaaaagaagtcccgctacagtgac

SEQ ID NO: 14 - DNA, 289 bp, Homo sapiens
aaatccaagtctcttgaggaccagagaagcactgctacctttttctttattcaacacagataccacagaatcagcagggtgagaaacaattgcacaaaagactccagctatgtaacctgctacaaatgttacaaccagctgctctggctttgaacattcactgcggggcttaggaaccacaaacttgtacagtgcttcaacagtacgttcaaagcaggcgaacttcatcatggtgtatggtatctgtctcatccagagaggagcaacccccttgtagaatgcttttagg

SEQ ID NO: 15 - DNA, 451 bp, Homo sapiens
  misc_feature 163, 279, 287, 305, 320, 339, 351, 382, 415, 419, 420, 429,431, 439, 450, 451: n = A,T,C or G
ccagtgacgggtgggttggcagctggactggcgtggcatggctagctgccctgggcaccatattccctgcctgtcaccactcctggttgtccaacaaagcaaagtcacaatgacaagatccagagaggggagtctccagctggagatggtgccgctgtcacanggcaccagagcagcaatgtgacagcttctcatggaggcaggactctgttcccagtccctacccaaccctggcttgatccttgtcagtgtcttatttctttgccttgcctttatctnagcctggnttcccttccaggcagctntgagtggctcttggnccaggcttgtctccatctntccttcctcttnccaactccctaaactcaggacccagtcactnctgctccttacatacacacacacacttaacacncgcnnacaactgantnttaccctntttccccccann

SEQ ID NO: 16 - DNA, 452 bp, Homo sapiens
  misc_feature 326, 404, 416, 423, 428, 429, 442, 443, 450, 452: n = A,T,C or G
aaaaactcacaagctctcacctagactttggagagcagtctgttttctgtaatgtctgatactagaaactaatttgcttattttagttgtattcaagatttgaagatgtattttatagacaagttctgtttttgaactttgtggaactgttccaatcaatcaatttcccagttatgatgagtatttacattatgaatgtataacccagacatgatttgtaaagccgacagtatgtttctattacacaacactttttgatacagcgtctcttgtcttcactgatactggagtctccgttgtctgcttggtcccttcgagtttctagntacagacacaatcatactgtgattttatttttaatatggatatgctatcaaactgtgatacacttataattcactggngcctgcatccanggagatnggagnngggggaaaactgnnttttaancn

SEQ ID NO: 17 - DNA, 244 bp, Homo sapiens
cctgtcatctactgaaaacctgaaaggatttattgagataataattccattgctaattgaatgctgggttgaagctgtacctccacaactagctactcctgttgggaatggtatagaacgagaacctctacaggttatgcagcaagttcttaatattatttcccttctgtggaaactctctaaacaacaggatgaaacccataaattggagtcatggcttcgaaagaactaccttattgatttt

SEQ ID NO: 18 - DNA, 84 bp, Homo sapiens
ccatgatgtactcgtcaaagtcattgggcagctgaaccttgaccagtcgggtcttgtacacatagtccactcctggctcacagg

SEQ ID NO: 19 - DNA, 312 bp, Homo sapiens
ccacggcgcccatggcagagcagagaacagaaagtacccccatcacagcagtcaaacagcctgagaaagtggcagctaccaggcaggagatcttccaggagcagttggcagcagtgccagagttccgcggtcttgggcccctcttcaagtcctcgcctgagcccgtggccctcaccgagtcagagacggagtatgtcatccgctgcaccaaacacaccttcaccaaccacatggtttttcagtttgactgcacaaacacactcaatgaccagaccttggagaatgtcacagtgcagatggagcccactgagg

SEQ ID NO: 20 - DNA, 420 bp, Homo sapiens
  misc_feature 160, 313, 329, 336, 373, 397, 401, 412: n = A,T,C or G
ccacccccacagccacggctcccactgccagcaccaggcccaggggcaccagggtggagaccagcgctctggagcttccaccttgttcctcagagctgccggaatccacagatgctctgctcccatcggcttgatctcttgtatctgccaccgccttttnctctgcaaaaagcctgggatcctgaatggctttgttctcaatctcccggaaaccagagtctagcaccttctcatcaggagcaacgtctgccttcgctaggctgacatcgcgggaccccgctgccttcctctcttcaactgccacatagacggntgcaatctctccatanaagtggncctgcttcacttcacaccagtaccagccctcatcagncctggtcaccaggttcagggtcangggnacaaagccggntgtttttt

SEQ ID NO: 21 - DNA, 435 bp, Homo sapiens
  misc_feature 195, 233, 278, 297, 333, 349, 351, 369, 379, 405: n = A,T,C or G
ccaaccaagcgcaccaggtgacacttcagtgaatggccctgtatgacgggtgacgtctgctgctgctgactgaggactgcagaccgccaccactcaggggctctggaggggtcagctggagcccaccaagctgtcactgctgcactcactctgcaagggatcaggaccagcaacctttatattctagattctaanacattgtacagagaaattcagaagtgtaaaaatattgnacattgacaaataccaagaatttttgcgtatgtttatattgtatngttctaaataatgggtagnctgtgaaataagatcttgccacccatgtaataatantagtaatactatagtnanaaatggctgtaagaatantttttataanagtgagtacacagatctattggtatntgagccataacttttgacaagttattttgt

SEQ ID NO: 22 - DNA, 407 bp, Homo sapiens
  misc_feature 247, 274, 293, 351, 364: n = A,T,C or G
aaaatcaatggtgatgttctttcttaagcaacattcttctcttccctaatagctacaatatgatacagtacgcaacagctcacttgaaagtgctagaatcagaggataaagaagccataagccaccccacttacatttcctactatacaatgcctttttggcgcttgataaatcaagcattcatgtagcattacattcaacagaaacatttctcgtactttgggtttaagatccttgtccctccagntcggatgtcgtgacatctgactcttcntcattgtaaatattttcanccatttgccatatctgcatgatgttatcctcagacactgagcaaatgacccaaggctnattggggttccanctaaaatctgaaatcttagcagtgtgggctccatgaataaaca

SEQ ID NO: 23 - DNA, 272 bp, Homo sapiens
cctgatgcaactgtaaaaagattacttaatgaatagactatatggaaattgtataaaatgttattaccttttatcgttagtagcttaaacagcactatatcactaattgctattcaaaatcaaaaacctgtttttgaatccccaagaaggcagcatgtgtatacaaccataccaccttgtacttaggggtgtgtcaaaacataattcaacagaaactttggctttaggaaagagtcacaaatatttacctgcccggcggccgctcgaaaggg

SEQ ID NO: 24 - DNA, 424 bp, Homo sapiens
  misc_feature 222, 376, 396, 399, 402: n = A,T,C or G
aaaaacagatagaataaacctcatcaataagcattttcctaaatatctctttgtgttatatcaaccaacataaaaaagggaaaaacataaaagtgtccctttataaatgatattatttccagataagaaagttgaaacaaaggtttgtaaagtctcctgaactattcagtttaataaccaattatccctcaatattacaaaataaaatgactggatcaatgntgactcttctttgatatcatttataaaatgctttgatattacttactaagttccctgataactcaaacaaggtaaaattaacactttcattttcaggtattgctattttagaagaggattaccactttcatttagatgaaactgttttaccaanagcctcctcaggatccaacncanagnaattcttattgcctctcatttt

SEQ ID NO: 25 - DNA, 372 bp, Homo sapiens
  misc_feature 136, 191, 253, 266, 267, 280, 299, 328, 329, 354, 360, 366: n = A,T,C or G
cctggaatgtcactacccccaggcggttggggtccacaatgctcatgatgcgggcaaattctgcttctccctgggggtcgttgccaatatcataacccaagctgatgaggcaggctttgaactcctcgggacccantgtgccggagtgatcccggtcaaagtggttgaaggaggcccggaactcattcatntgctcctggctgatgcccttggcatcccgggtcaggatctggttctctacctcattgatggncctggctgatggnnggtgagcatctgntcccatcccacacggatgngctccatggtgtagttggtgtgcttgttnnctaagatgagcggctcctggatganctggtnggtcgntcctcc

SEQ ID NO: 26 - DNA, 342 bp, Homo sapiens
  misc_feature 203, 224, 260, 307, 336: n = A,T,C or G
cctcttggtcttgtcgttggttatggcgtactcctgcatgcccagctcctccgctaccttggcctgagttctattattcaccaaagagcttcgcaacaaagttaagtgtccttcatgatgatctgggaaatgaatgaataagtactctgtggctaccagttgcattatggagtcacctaggaattccattctctgattgtggnctagggtcagatggttaaatnccacagttctcaatgtgaatgcccttgccagaagtngaacatgagtaaaaattactccaattgcttcttctaactcagtaagngtttgtagaactggagaagtttcaataantttgtc

SEQ ID NO: 27 - DNA, 315 bp, Homo sapiens
  misc_feature 132: n = A,T,C or G
ccgtatttcaaagatttttaggggaattaattctaggacgatgggcatgaaactgtggtttgctccacagatttcagagcattgaccgtagtatacccccggtcgtgtagcggtgaaagtggtttggtttanacgtccgggaattgcatctgtttttaagcctaatgtggggacagctcatgagtgcaagacgtcttgtgatgtaattattatacgaatgggggcttcaatcgggagtactactcgattgtcaacgtcaaggagtcgcaggtcgcctggttctaggaataatgggggaagtatgtaggagttgaa

SEQ ID NO: 28 - DNA, 311 bp, Homo sapiens
  misc_feature 135, 142, 173, 177, 212, 237, 243, 245, 262, 276, 288, 290,298, 299, 302: n = A,T,C or G
cctgatgtgctggaactcgcaggaaagagtgttgtgtaagtaggggatgggctgatgtagaaagttgtaggttctccaacaaggtctgaggctgtggagcgggcaggtaagggtgttgttccagttgcgtctganctgctgnggaaggctgttgattcctgaccaatgtctgntggntgtgagggtgggcaggtaacactgtgtgagtgaancctgggctgtcactggaagggtgtnaattgntnactataaaatggacatntgtgctcgcttgtnagaaaactctcngntttcacgnngancctgggctt

SEQ ID NO: 29 - DNA, 516 bp, Homo sapiens
  misc_feature 1, 501: n = A,T,C or G
ngctggggccgagctcggatccctagtaacggccgccagtgtgctggaattcgcccttagcgtggtcgcggccgaggtccaagaatctcttcgttcttcctggaacacttactatactaacacagagtttgtaatagttgttgtggacagtacagacagagagaggatttctgtaactagagaagaactctataaaatgttagcgcatgaggacctaaaaaaagctggattgctgatttttgctaataaacaagatgttaaagaatgcatgactgtagcagaaatctcccagtttttgaagctaacttctattaaagatcaccagtggcatatccaggcatgctgtgctctaactggcgagggattgtgccaaggacttgaatggatgatgtcacgacttaagattagatgatctctactgacctcttctctagattttgtataaatgaaggtgctggactttacctgaaagctgcaaaaattaatggtttagatatattnataataaactgattt

SEQ ID NO: 30 - DNA, 355 bp, Homo sapiens
  misc_feature 343: n = A,T,C or G
cctttaccaagtactgcaagaaatggcaggatgaggatggcaagaagcagctggagaaggacttcagcagcatgaagaagtactgccaagtcatccgtgtcattgcccacacccagatgcgcctgcttcctctgcgccagaagaaggcccacctgatggagatccaggtgaacggaggcactgtggccgagaagctggactgggcccgcgagaggcttgagcagcaggtacctgtgaaccaagtgtttgggcaggatgagatgatcgacgtcatcggggtgaccaagggcaaaggctacaaaggggtcaccagtcgttggcacaccaagaagctgccccgcangacccaccgagg

SEQ ID NO: 31 - DNA, 355 bp, Homo sapiens
  misc_feature 181: n = A,T,C or G
aaatgtttgttgatggcaacattaactattaaattaaagcaccttatactctgctgcttaacttgcttgtaattgcacctttgttacctgcacattttcatatagaatattgttgtaacattacttcatgtgggtctggatggaagattagtgggcctacaggatcatttatttatattgnttatattacaataatatattgtagatcagttgtaagttcatttctttacaaataaaagcctcttccatttgactggtctattgaataatttttttttctttaagcttatgagacatggggaatcctctgtgtaaacaaaacaaaaagcttagtgaggtgtgaaatggttttacc

SEQ ID NO: 32 - DNA, 285 bp, Homo sapiens
aaaaaaagctcacacatagtctcccctcccttccccagtcctcttggcgacagggcggtcacaggacatatgtgttcttcaccagctgctccttgtcatctccggagctccagacggtgcgcagggcacgctcctggttcctccgtgccacccggatcaggtagaccatggaggctcccaggaagaggatcaacaccatcacgaacagccccgccagaaccaccacctttgagccaaggggcaggggaggattctcctgctggcggaagcagcggagcatgcagg

SEQ ID NO: 33 - DNA, 250 bp, Homo sapiens
ccagtcacacgccgtccttgctccgtgatgtctttcacacaacagtgaattttattaaccagaacctacgcacctacgtgaggagcttagccagaaatgggatggactgaacggacagttccagaagtgtgactggctaaagctcgatgtggtcacagctgtatagctgcttccagtgtagacggagccctggcatgtcaacagcgttcctagagaagacaggctggaagatagctgtgacttctatttt

SEQ ID NO: 34 - DNA, 455 bp, Homo sapiens
  misc_feature 216, 285, 318, 332, 354, 355, 400, 401, 411, 421, 432, 433,448, 455: n = A,T,C or G
cctacagacttatttcttcttggacacacccacggtgcggccacggcggccggtggtcttggtgtgctggcctcggacacgaaggccccagaagtgacgcagccctctatgggcccgaatcttcttcagtcgctccaggtcttcacggagcttgttgtccataccattggctaggacctggctgtattttccatcctttacatccttctgtctgtncaagaaccagtctgggatcttgtactggcgtggattctgcataatggtgatcacacgttccacctcatnctcaggtgagttctcccgccctcttggtgaggncaatgtctgctatnctcaacaccacatgagcatatnnttctggccacacccttaatggtagtgatggcaaaggctattttcnnccgcccatcnatgttggtangaaagtaactnnaaaaatatgctggancttttcn

SEQ ID NO: 35 - DNA, 409 bp, Homo sapiens
  misc_feature 346, 368, 371, 395: n = A,T,C or G
aaaagaaataccagtgagtgccttaaagttggagaagtaactgcccatgcccagaaataaggatgccagtgcccagaagcagtgagattagtctgtgcccacaagcagaggccccctcgatgggagggagtggcaggcaggagaaggtggcgctgccaggtgcccgggtctattggaggcgccccatctcagacttcctaacacagcctgtgtggaaggcagaacaaagaatgcatgcccagtcagaaatctgttctattctgctccaggaaaatcggaaacctgtgagtcagagtcagagaaacttacccaagcaacgtaattcctgttttcatgggtcctgtanatgtttgagtcacgaaggtaangcnggggagtgactgaataaactctgncttttacctcggca

SEQ ID NO: 36 - DNA, 225 bp, Homo sapiens
aaaacttgctccacacagcgtagtcaagccgactctccatacccaagcaagtcatccatggataaaaacgttaccaggagcagaaccattaagctggtccaggcaagttggactccaccatttcaacttccagctttctgtctaatgcctgtgtgccaatggcttgagttaggcttgctctttaggacttcagtagctattctcatccttccttggggacacaaa

SEQ ID NO: 37 - DNA, 267 bp, Homo sapiens
  misc_feature 32, 245, 262: n = A,T,C or G
ctgatgggtctcatagtcctctgggatggtgncattgcagcggtaacgcaggttggcccagatgatgttctcctgggagaagcagaagacccccaggcggccaccccgcatggttgtgtccaagaccacgttgctgtcggccaccagctcagggccctcatagaatcgcaccctgatgtagcccacttggggccggtgctgcaggaaccaacgataggacttcttgtccttccaacccacgtttngcgggtccttccacagnagccg

SEQ ID NO: 38 - DNA, 556 bp, Homo sapiens
  misc_feature 156, 239, 359, 438, 442, 452, 467, 468, 497, 503, 534, 547,550: n = A,T,C or G
aaagtttcacttccctagcaaaatatcttcagtcaagaaattagtctttgaaaattatgaaaattgttgtgggaaatatttatacaaattattactgataatgcacatatattttgaaacattgtttctagaagcaataaaatataacctatttangagataacccaaatgatttgtaaaaaaattaacttgtagaaaagggaaggatgttgtgtaaaatcaagtcaattatttgaggnttttataatattgagtacttatgtactaagtcacacccagccagtcaataactgagaaatcaaaataaaataataatttcaaagaattacataaatacagggccttttgagatttttggnattgtaaacaaaaacgaatggtttttacaattcagtgtaattctacgaatatttatttggccccatgttaggcactgangctncacagcaagngaaatagacctcggnncgcgaccacgctaagggcgaaattctgcngatatncttcaccactggcggggccgctcgagcatgncattctagagggnccnatttcc

SEQ ID NO: 39 - DNA, 203 bp, Homo sapiens
ccatcgtgtttgatggtaaggtttctcacaaagccgaaaatgtagctgaagatcaaaaaaatctcactcaagcaaagttccactaacttatatatttcaagtgttttgtaaccaagaaggggagggagaagagattcgattctgagtctcctactcccgggttctgcgtagagaagccgactgctgctggaggtcggcaacgc

SEQ ID NO: 40 - DNA, 560 bp, Homo sapiens
  misc_feature 398, 422, 439, 472, 496, 522, 542, 548, 556, 560: n = A,T,C or G
ccagcaggcgcatgaaggcaagttgggtagccatttccttggaagtcactccttctacattatattcaaactggctgccagcattgatagtttctcctagccagacgtgtttcttgtccttggagctcctataccagttcttggctgggatgttttcaggttgggcccggatacaggtttcgccagtagagaaatcacagtatactttgatagcatccatagtgcatccttggttagggtcaatccagtagtaaccactgctccactctgggtggctgagtctcaagtcacggcatgtgcgagctgggttctttctagagccttcaggagtaagaagggtctcaatctggttgttgagagacttcagagtagcatcaacttcatagtccttgggtctnagagaaggtgctgagcgaggctgntcacccctgtagaagtntccatcgtaaccaaaagtcataacccccaccgnttacacaaccttgccccgggcggnccgccaaagggcgaaattcttgcagnatatcccatcacacctggcnggccgntccagccntgcn

SEQ ID NO: 41 - DNA, 265 bp, Homo sapiens
gtgggcgtttgtcaggggggaagaagcttggcagcccagacctgcagtaggaggggcaggagcaggggatactgcagatgggtgttcacaggggcagaggcgggaagctaggagaggaggggacctccatggaaggcagttttgtgaatatccggagaacttggaagtgactttcaggatcatctgtacaaggggatgttgggcttccctccccggcaccgggatgtggatccaacactccccaggcggaaattcgggcccctgg

SEQ ID NO: 42 - DNA, 407 bp, Homo sapiens
  misc_feature 284, 323, 375, 384: n = A,T,C or G
ctgagagaccaggagaagttccagatgcagagactgtgatgctcttgactatggaattattgcggccagtagccaagttagagacaaaacaggcataggtcccgttattatttggcgtgattttggcgataaagagaacttgtgtgtgttgctgcggtatcccattgatacgccaagaatactgcggggatgggttagaggccgagtggcaggagaggttgaggttcgctcccgaaaggtaagacgagtctgggggggaaatgatgggggtgtccggcccatanaggacatccagggtgactgggtcactgcggttgcactcnctgagttctggattccacatacataggctcttgcgtcatttcttgtgacatngaatagagntagggcctgttgccattggacag

SEQ ID NO: 43 - DNA, 343 bp, Homo sapiens
ctcacatctcattatggtgcggcccatgtacattaaagtgtgatacttggttttgaaaacattcaaacagtctctgtggaaatctgagagaaattggcggagagctgccgtggtgcattcctcctgtagtgcttcaagctaatgcttcatcctctctaataacttttgatagacaggggctagtcgcacagacctctgggaagccctggaaaacgctgatgcttgtttgaagatctcaagcgcagagtctgcaagttcatcccctctttcctgaggtctgttggctggaggctgcagaacattggtgatgacatggacacctgcccggcggccgctcgaaggg

SEQ ID NO: 44 - DNA, 186 bp, Homo sapiens
aaattttcattgagttgtccatctccagcatatagggcttcaggagcagagcagaccttgtttttagtggttccatgggataaaatgggattggaggagctagaagaattcagggtctggtccaatctgccagtcttcctgaaatatcgaaaatacaccagggctgctatatcagagccaccctgg

SEQ ID NO: 45 - DNA, 503 bp, Homo sapiens
  misc_feature 169, 279, 332, 377, 380, 387, 390, 404, 424, 428, 450, 456,466, 477, 483, 485: n = A,T,C or G
ccaaaaggggttgccactgctcattatctgaatgcagaaagtctgtccaccccttacctttaataaccttaaaggggaagtgccgtggtggactggtaagtcaagagaatccatctcaggaacagcacttccaggcccttgcctttaagaactccttaaaggcaaagtnggacacatgccgcaccagatgagagccagaacgttttcgggaaggtccctggaggaagtgttttcgtgtctttacctttaagactctcttaaaggtgaggcatgttcacncagcgtacaaaggaggcaaactccgtcaaggagtctacgaagcacttttccanatcttgcttttagaatctctttacagatgaggtgggacctcggcncgngaccacnctnagggcgaaattctncagatatccatcacactggnaggncgttccaagcattgcttcttanaagggnccatattctncccttatattngagtcntntattccactttcaacttg

SEQ ID NO: 46 - DNA, 559 bp, Homo sapiens
  misc_feature 171, 274, 320, 379, 384, 415, 423, 436, 437, 447, 454, 464,473, 475, 502, 511, 545, 547, 550, 557, 559: n = A,T,C or G
gtgtttcctggcaatccattttaaccttggatgggccttcgatggtgacggataatgtccctggacctgctcgggtggtgttaataaagaattccgactggatacctgtggtgcccccttcgagtcccgtgccataggcggacaccagggcagggttccccgcttgtccangctccccaacgcgcactttgaaggggcttccaaccacgtggctcccattgaacttgacatcgatggtgtggacaccattctcatgagggatgaaggcgaacancatacttatctggctccagctcagacacgtggcactcctccacggntccagaggggctgtgcacctttgcatcaatcttgccttttgcgccattcaaccttatancaaangatgctggctggttaactcttaatccccatnccttgaangctcataacattnnaggcggccgngcgtccnacggagggtncgatgaccncnaccaggtagggggcttttcccgggatntgcttcatnattgaactttgatggtccacctcgttcgtaccangnttntttgggnan

SEQ ID NO: 47 - DNA, 513 bp, Homo sapiens
  misc_feature 369, 380, 403, 417, 448, 453, 485, 490, 494, 496, 500, 509: n = A,T,C or G
cgctgataagaatcttcaaaaaaattctatatgcgcactataaatgtttctctgtttgccatttctggtaactatcatgaacacagacagttaactctttcataactgaattggatagctttattttacagaagtatggcaagtttacaaagcaatatctaaatctaattatcattagttgcatttggactaaatgtgatgatatacttttgcaattgattctgtaaataaaaggattacactaaaatatttgtattaaaagaagaaaagataacattttacctttagataactgcacttgtacctcactagagttaatcccacccaatcagattgagaaataaattggggaatgtggaaagagtccanaagaggtcagnaatttggagaggtactggccttntggacaacatttanacccctctacaattattttctttaagctgantgctncctccctggaatattcatgttttctccctctncggantatntngcgntccccccanacct

SEQ ID NO: 48 - DNA, 413 bp, Homo sapiens
  misc_feature 401: n = A,T,C or G
ccagcgagcacatgaagcggttcttcgtgaactttgtggttgggcaggatccgggctcagacgtcgccttccacttcaatccgcggtttgacggctgggacaaggtggtcttcaacacgttgcagggcgggaagtggggcagcgaggagaggaagaggagcatgcccttcaaaaagggtgccgcctttgagctggtcttcatagtcctggctgagcactacaaggtggtggtaaatggaaatcccttctatgagtacgggcaccggcttcccctacagatggtcacccacctgcaagtggatggggatctgcaacttcaatcaatcaacttcatcggaggccagcccctccggccccagggacccccgatgatgccaccttaccctggtcccggacattgncatcaacagacc

SEQ ID NO: 49 - DNA, 560 bp, Homo sapiens
  misc_feature 286, 395, 398, 463, 464, 484, 507, 509, 518, 521, 522, 528,533, 542, 547, 549, 553, 558: n = A,T,C or G
ccacggctgcttccagctcctccctggagaagagctacgagctgcctgacggccaggtcatcaccattggcaatgagcggttccgctgccctgaggcactcttccagccttccttcctgggcatggagtcctgtggcatccacgaaactaccttcaactccatcatgaagtgtgacgtggacatccgcaaagacctgtacgccaacacagtgctgtctggcggcaccaccatgtaccctggcattgccggcaggatgcagaaggagatcactgccctggcacccancacaatgaagatcaagatcattgctcctcctgagcgcaagtactccgtgtggatcggcggctccatcctggcctcgctgtccaccttccagcagatgtggatcagcaancangagtatgacgagtccggcccctccatcgtccaccgcaaatgcttctaagcggattattgacttanntggcgttacacccctttttntgacaaaaacctaacttgcggcnanaaaacaaanatnnagattnggcantggctttantttgntntttngggtntg

SEQ ID NO: 50 - DNA, 231 bp, Homo sapiens
  misc_feature 228: n = A,T,C or G
aagtatttaacactctactgttaatgacagatgttctgtttttataacctaccaaaaggaaactagaggcttcttggtgaagagcatttttgtgaagtgggttctgcaaggagcctataaagccaagggtggtgtccatttctgggaatggttaaacacaaaaggctgatagctggtatcacatagttggagtcagtgcataattccaagtggctttttttttttttngcc

SEQ ID NO: 51 - DNA, 265 bp, Homo sapiens
gtggtgcagtgggtgagctttgctgattccgatatagtgcccccagccagtacctgggtgttccccaccttgggcatcatgcaccacaacaaacaggccactgagaatgcaaaggaggaagtgaggcgaattctggggctgctggatgcttacttgaagacgaggacttttctggtgggcgaacgagtgacattggctgacatcacagttgtctgcaccctgttgtggctctataagcaggttctagagccttctttccgccagg

SEQ ID NO: 52 - DNA, 318 bp, Homo sapiens
cctaccctgattgtctgtttacatgaatgtgcatgctgcattcaagcggctttaactctaagaccgtaacagtacaatatctttattggcacaatttactgcaattgtattcagactcaatcctctgatcagggtgagcatcaaactcaaactacgccctgatcggcgcactgcgagcagtagcccaaacaatctcatatgaagtcaccctagccatcattctactatcaacattactaataagtggctcctttaacctctccacccttatcacaacacaagaacacctctgattactcctgccatcatgacccttgg

SEQ ID NO: 53 - DNA, 335 bp, Homo sapiens
ctgatgaagaacacgggcgtgatccttgccaatgacgccaatgctgagcggctcaagagtgttgtgggcaacttgcatcggctgggagtcaccaacaccattatcagccactatgatgggcgccagttccccaaggtggtggggggctttgaccgagtactgctggatgctccctgcagtggcactggggtcatctccaaggatccagccgtgaagactaacaaggatgagaaggacatcctgcgctgtgctcacctccagaaggagttgctcctgagtgctattgactctgtcaatgcgacctccaagacaggaggctacctggtttactgcac

SEQ ID NO: 54 - DNA, 280 bp, Homo sapiens
ctgtttgctccattatttgcataggaaatgaccacaatacaaaaataagagggaaaaagaagcaaaacagcaaccgatttctgcttttcatgtaggtgtgtttccacgtataaacattttgaagcctcttacaaaattatttacatcggttgtcatctatttacatcttttaagagcaacttttctaacaaacaaaactataacttatcaagttatgaaaattgtcttctaaaaaaacttactatattaccacaaaataaataaagataaacaatatttt

SEQ ID NO: 55 - DNA, 559 bp, Homo sapiens
  misc_feature 389, 448, 467, 473, 486, 514, 528, 529, 532, 547: n = A,T,C or G
ccacaggcttggcagccacaggtttcgcaggggccggctttgcagcggctggcttcacagatggctgatttataatagtcacaggctttgttgtggtggttacaggctttgttgtggtggtcaccggcttcgtcgtagtcaccggcttcgttgtcgtcactgggttggatgtaggacttgaagtaacgttattcggaacatttacttgtttgtgaccaaacttcacaaggttctttgtgggttggtccccttggaaccaatcacactgtttcctgatatctggggacaagtaaaaagcattttcactgctgacgaaggatggcaacagcctcccgaagcgcatcaaaggctcctcgttgagctcggtggacttgtccactaatttgaanaaacgtcgtttggctcactggcgaaggtgtatacctcttgatgttcaccttccttgccnatgcccaggaccacgaaanaaatancccttgcatttgncctgcaggatgactctctgggcctcctncaaaaccttggccnnaanaaccctaaagggcgnaattctgcaaag

SEQ ID NO: 56 - DNA, 448 bp, Homo sapiens
  misc_feature 359, 433: n = A,T,C or G
cctgttcagcaaaatccaatatcattctctcagtactttataaatggaattttcttctacttgtatccatttcccggggcttatggacccattcatactctccatatttagaatcaaaggttcctttctgaagagaccttaattttaaggtaaaacgtggtccaagttcctgaattcccactttcttttcactcctgaatatgtatctgtgaaatctgaagaatatgtaatcccgttgattgtggaatgtggcaacctgccttccgataaattgaggattatgaggaaagagagatgcaaacatacgtccaattgaatgacccagccgtgttgtaaaattattcagaattatttcaggnatgtgttctgtggggtccttgcctcttctcttaatttctttaccgaagacgaacactgctcattttacctcggncggaccacgctaagg

SEQ ID NO: 57 - DNA, 454 bp, Homo sapiens
  misc_feature 177, 219, 233, 271, 287, 359, 401, 431: n = A,T,C or G
ctgtttgtcacctttaacatgctacaacagggctaaattcatgaatcccagagaaaaaaatcccccaaacactggatttctaaatcagtaccatgaaccacatgaagaactaatagggaagattcgaaacccactaaacaagaggtaaacaagatcagataaataaaaaaaaaaggnttaaaacagactcaccatatttacaattcccattaaattacncataaataaatatntacagagacgtgaacactgattcccttatataactgcnaatcgtgttgccaganaaagttcaagttggtcgctttaccttaaagaggaaaaacttctacaactgaagacatgacatggaacttcgngtatttgtgttcaagtttattcacaatactgataaaaaggtncggcatcatctttcggctttttttttaagnattggctacaatcttgactgaac

SEQ ID NO: 58 - DNA, 364 bp, Homo sapiens
  misc_feature 322, 350: n = A,T,C or G
cctgctactctttctttgtggaaactgacagctccacctcgggaagctggatgccaaccttattcccactgtcattgctagaagaggaggacagtcgggacttcttagaggccagggacaccccactcccctgtaacttgcctgtctcatcatcgctcccagtcacctcataatgacctttgctctttgaccccaatccaccaaaggtaccgaatttcagcttcccgtgtttccctttaactttcccaccttccagcgacacttccccaccttcaaactccagcgtccccgtcggggtggaaggtccagagaactctctttnatcactgaatgaatttgaacggtgccgnggcttcttactttt

SEQ ID NO: 59 - DNA, 368 bp, Homo sapiens
agaaagcatcatcaacatcaccaccagcagcagcaccaccagcagcaacagcagcagccgccaccaccgccaatacctgcaaatgggcaacaggccagcagccaaaatgaaggcttgactattgacctgaagaattttagaaaaccaggagagaagaccttcacccaacgaagccgtctttttgtgggaaatcttcctcccgacatcactgaggaagaaatgaggaaactatttgagaaatatggaaaggcaggcgaagtcttcattcataaggataaaggatttggctttatccgcttggaaacccgaaccctatcggagattgccaaagtggagctggacaatatgccactccgtggaaagcagac

SEQ ID NO: 60 - DNA, 440 bp, Homo sapiens
  misc_feature 330, 353, 368, 390: n = A,T,C or G
aaaaataatcattcaggttattctaaaattttgccataaaattagcaaagtatgccttctgttaattgctaaaaccaatatttcacatataaaagcatgtgatctcattctacatgcagctccatttctgaaaattaaaaacctatcatttcatgggctaaattatagaactttctatattcgaagaactacttcataagactgttatgacaaatgctttttattacataatatttagtagtcatgctcaatcaacaaggtcaacagaagcttgtgaatattctgctaaataatctagcacactaatacatacacgtttttcagtgcagnaacattgaaataatccttgtatnctttattcagacagntctgcaaactagggaataaatnaagatacgaacacacaagaacttttttttacctcggcccgcgacccacgc

SEQ ID NO: 61 - DNA, 180 bp, Homo sapiens
ccatgtgtgtcaaagtcagggaatccctcctcctgggagccaagaggaagtctctcaaaactagaagggaaaggtgttttctccacatcaatccagctttggagacattctattagtgacatatgccccttcccccaaaaacaacaatgaagtgttctgtgtgctaacaacatagctttt

SEQ ID NO: 62 - DNA, 462 bp, Homo sapiens
  misc_feature 240, 329, 338, 374, 381, 400, 447, 452, 455: n = A,T,C or G
aaagacagctttcaggtatttggggactacattattaccaaaccttggctttgggagattatacaggtccgaggaactcgtgtctactgcagacgaatgcaattaccccaccttcctccatacagaattgttaggaaatgtccactcctttgggggtgatttttctcctcaagttgtagccaacattttgtccgtaactgatttcagggcaaacatttctgacatcttcctccagctcantctgccatgccttggcaatccagtttcctgtcatatgcgagccatccaagttgatgccaagtaagatttgcccagctcaaagtgaaagngtttgcgtnttggtatccggaatccctcagccccagtagcaaagntttagtnattcacccttctccaatangacgtttgtgaacgccctgctgccctttttgtaaaataaaacagggngcccntgnaagacct

SEQ ID NO: 63 - DNA, 530 bp, Homo sapiens
  misc_feature 451, 500: n = A,T,C or G
ttgaaggcaaagtttgacattctataagtttataaaagaggatatatggatgaaatttggttaatttcagaaggcacctcaaggctaaaggctttttgtacttctttcatcaatcaagaagttaacacgcttttattgctattcaagtagcaaaggaaaactactctcacaaacttcagttcaacagagaagaatcaccattaagattgagatatggaattgactaaaaccgaagtctccatacacgttatcaatggagcaactttcctgtgtgctttcaaattaatgaaatcgtgaaagaaaagtcaccattcgccattgtgatgttaatgtgtcattgaagatttcagttactacactaggcactgaagtaccattctggagggctgtccactgtatagaacatttatgaatagaaggtaaggacactctgatgattcccacgaactangaggattggcggtaggtccttagatagagcttctaaccatgccatgtanagagcactagacacagcccttttcttgcaa

SEQ ID NO: 64 - DNA, 478 bp, Homo sapiens
  misc_feature 147, 193, 328, 330, 339, 343, 350, 353, 355, 361, 363, 411,413, 424, 426, 428, 439, 460, 469: n = A,T,C or G
ctgttgatggcaatgtccgggaccagggtaaggtggcatcatcgggggtccctggggccggaggggctggcctccgatgaagttgattgattgaagttgcagatccccatccacttgcaggtgggtgaccatctgtaggggaagccngtgcccgtactcatagaagggatttccatttaccaccaccttgtantgctcagccaggactatgaagaccagctcaaaggcggcaccctttttgaagggcatgctcctcttcctctcctcgctgccccacttcccgccctgcaacgtgttgaagaccaccttgttcccacccgtcaaaccncntgattgaangtgnaatgctnacntntgagcncngatcctgcccaaccacaaaagttcacgaagaaccccttcatgttgctncntggacctctgncncnacccccctaanggcgaattctgcaaaaatccnttcacactnccggccctc

SEQ ID NO: 65 - DNA, 433 bp, Homo sapiens
  misc_feature 396, 400, 404, 412, 423, 430: n = A,T,C or G
ccaataagatgggtctgaaatttcagagataccgacttgttccttacggaaaccattcatatctggagtctctgacagacaaatctaaggagctgccgttatactgttctggggggttgcggtttttctgggacaacaagtttgaccatgcaatggtggctttcctggactgtgtgcagcagttcaaagaagaggttgagaaaggcgagacacgtttttgtcttccctacaggatggatgtggagaaaggcaagattgaagacacaggaggcagtggcggctcctattccatcaaaacccagtttaactctgaggagcagtggacaaaagctctcaagttcatgctgacgaatcttaagtggggtcttgcttgggtgtcctccaattttataacanatgncttntttcttanggggaggctgncttacangat

SEQ ID NO: 66 - DNA, 517 bp, Homo sapiens
  misc_feature 120, 327, 385, 391, 414, 417, 428, 459, 464, 472, 496, 512: n = A,T,C or G
aaaaactaaattgagtaaagtatttgtgatttagactataaaataaattctcaaggaattcaacccctccagtcaatactttttcttaatgtctgcattgtaatttagcattttgcatgngggagtacacaaatgaattgaatattggatcagaatttaccctaacttgaagagtaaaaagttatcaaagtttcaccttacatggctttattgaaataacattccatcgaaaattccaataaaaattggaatatattatgagcactgccaattgctcattttgtctgatattaacagattatgcatttcctcagagaagcagtaggncccatatatacagacatatatatggctctggtttgaaagagaagacaaatcctcgtcntacttntatggatttatcactggcgcttntcnatccgaaaaanccaaggttacgacctaccagttggaacaacnttganaggggaanaaattttttacctgccccggcggngccctaatggcggaancctgg

SEQ ID NO: 67 - DNA, 558 bp, Homo sapiens
  misc_feature 428, 551: n = A,T,C or G
ctgtgagcaatttgaatgcttgatatacttgagcttcctttacaccacctccaagatccaagaagttggctggcttcccaccattaaggaaaatgatatcacaagtagccatggcgagcccagcaccattcacaaagcaggcaatgttcccatctagtcctatgtattttagatcatatttggcagcttcattttcaatgggctcattctctgatttgtcgtccatagcaaatatgtctttttgtcggaattctgcgttgtcatcaaagtttatcttggcatcaaaacagacaacttgtccttctggagtttcaccaaagggattcacttccacctgagtagcatcaattttcaggaagagattatacagcttcgtaatttgatctgcagcctggcttttcaaaggcccaacgaagcctagattttcngccatccgctgagcttggctgtcctttattccttcaaaaatgtcaatttgctccctaaaaatgagcttccggtttgaacaggccctcttcaatgtcgacgcccccctgggggctgcccaccancacgggg

SEQ ID NO: 68 - DNA, 347 bp, Homo sapiens
ctcatgtggtgttgaggaaagcagacattgacctcaccaagagggcgggagaactcactgaggatgaggtggaacgtgtgatcaccattatgcagaatccacgccagtacaagatcccagactggttcttgaacagacagaaggatgtaaaggatggaaaatacagccaggtcctagccaatggtctggacaacaagctccgtgaagacctggagcgactgaagaagattcgggcccatagagggctgcgtcacttctggggccttcgtgtccgaggccagcacaccaagaccactggccgccgtggccgcaccgtgggtgtgtccaagaagaaataagtctgtagg

SEQ ID NO: 69 - DNA, 349 bp, Homo sapiens
cctggcgggctagcttgggggtccggccagcggtctcgatggcctgggtgtattgttccagccactgatcaatcttggagatgggcaagtctggctgggatttcttcacactgttactcttctctatggagcggtttagggactcggtcctgtcgatgagtttggtggtaagggctcaggggaggcgagctctgttcgatggtcccctccaagaccaaggggctgggtgtcctgggctgctgacatttctggtgctcctcctgttcctcctcagcccctgcggcccccaggttgtcctggacagtgtcctctgggcctggcccctccttgctcagactcaactcctcca

SEQ ID NO: 70 - DNA, 530 bp, Homo sapiens
  misc_feature 415, 456, 466, 473, 479, 496, 512, 516: n = A,T,C or G
ctgcaatgcaaactgaaactcattctgtatatcaccactctacaggagaggtctatttctggggcacccagaagtcagcacacatactgctgggaccaggactcgtaattcgccttggtccaactccttctatgggtttagctgccctcattcctgtgggtaatacaagatcaaacagtccacaactttgcctgtcttctctgctcccctaaggtccctctcccttcgccgtaagatgtgactgaccagtacagtttctcctgaattgacaaactgaactactccttctaccggctaaaccctgacatcagtagaatcaaaccaaaaacaaggtagagtgtttcacagagaagtggtggattgaataaggcagcagaaacacataccatccagcccctgaacctgaattttgccnaaacagagatactttaagtccatttcttttcaaagggggtntaatgctcanagtgggnaatagngactagggtattctaancggttgaataataatntctnagaaaaggttattg

SEQ ID NO: 71 - DNA, 484 bp, Homo sapiens
aaaaacatgttgaatcatgcttctttcacacttattttaagagagatgtaaattttgttcctgtcctctttctgtcattacaggtctggctcttgtaaccgtgatcaaactgttcatgttgtctgctacatttttgtctccatccatttttcctaccacctcctgaaggctatctgatagtcagtcacattagcagccccaggcagcagacaacaggaaagttaggaaatttgtgtttcgtgtcatttttaggagcatctgataaaacctccagcaggttttaggaagtattcatgtatttttctggttactttctgtcatctctaattgaactcacctgatgaaggttcagtgttctggggccagaatttatgattttagatcaccttctttggaaccttagatcactgtgttttgaaatcatgagtttgcttttaacttcatagggtcaactttacctgcccgcgcggcccgctcgcaaggg

SEQ ID NO: 72 - DNA, 325 bp, Homo sapiens
  misc_feature 135, 173, 175, 241, 263, 297, 311: n = A,T,C or G
gtgtcggcagggttgacctccgtggcgaggtaggtgccgtcttccacgcagtgggtaacgggcttctggctgcacctcttgggttggcagatgatgccacttccaccctccaggcagacacagttcttgcagtcnaactctaagtgctccccaaactctctgggcacattgtnangtcccacacagccgcaggtcttcacgcagacatcaaagccaggagcgtagttcatggtgccctcangacaaaagcagccttccaccangactgtgttgttctgctgggaggagctggatttncacgtgggctcttntgcagggccacagg

SEQ ID NO: 73 - DNA, 255 bp, Homo sapiens
ccttcttacaccttaggaatgaaatcgctgcatggagagttctcagcctcggacagctccctcactgacatccaggagacccgcaggcagcctatgcccgaccctggcctgatgcccctgcctgacactgctgcagacttggattggtccaacctggtagatgctgccaaagcctatgaggtccagagagcctcattttttgctgctagtgatgaaaaccatcgccccttgagtgctgcatccaacagtgatcag

SEQ ID NO: 74 - DNA, 244 bp, Homo sapiens
ctgaagatgttgaagtacaggagatacggcttatctttgttctcccccatgccacagtaggccccagtagagttcctggggtagaggacttgccgggggtctccatacaaccaggccacaatccccaccacgatgtaacctagaatgaagagcaggaagaggacgcagcagatgacatctgtgcagcttctgttcttgatggggcctcgaaaggaggggtcgtatttgactggcttcccgtagg

SEQ ID NO: 75 - DNA, 575 bp, Homo sapiens
  misc_feature 230, 312, 401, 405, 426, 483, 486, 505, 506, 516, 525, 530,531, 536, 546, 555, 559, 563, 572, 573, 574: n = A,T,C or G
aaagttgtttacagaaatttaaactcaattccagagattgaagttgtccaaacagctcatgggcttagtgtccaaactcctgcccagccttccctttccaagttggtgccacctccaggtagccattggtggttttcctattactgatgtggctgtggaatgataaggtcctagaggggccctggcatttcaggaagcggacctggtattccctgacaaacattgcttangaaagagggccggagaataagaagccagcacctcatcagtcagccctgcaatgtgagacttccgtagctgttgagagtcacntgcaggtgttctttcatcccgtctgattttaacccatggttgagacgttccaagttagatctgctgctcttatgtgtggggctgccacnttanggaacttgcctcaaaaacagnccacaagtggccaatacccggacttttgttcaagctttttaccctctgccgtgacgncgnctaagggcgaattctcgcnnatttttcatnacactgggnggccnntccangcatgccatntagagggcnccanttcncccttatannng

SEQ ID NO: 76 - DNA, 301 bp, Homo sapiens
aaatagccaatggctggttatattttcggaaaacatgattagactaattcattaatggtggcttcaagcttttccttattggctccagaaaattcacccaccttttgtcccttcttaaaaaactggaatgttggcatgcatttgacttcacactctgaagcaacatcctgacagtcatccacatctacttcaaggaatatcacgttggaatacttttcagagagggaatgaaagaaaggcttgatcattttgcaaggcccacaccacgtggctgagaagtcaactactacaagtttatcac

SEQ ID NO: 77 - DNA, 335 bp, Homo sapiens
ctgcagaatgtaactggtaaagaaacaatgccttccaagggtggccgacccccatcattgatgcggatcaagacgacatactccctctcctcaaagtctgtgtgcctggtagacagtcgggcatgagtaccattgattttggaaacttcccagtcgttttgtaagcttccactgccgagggaaaatgtaaaatggggaccccgaaataagtgctgatcatcatcagtagcctcaaaaatgagacttccaggtgcactgaggggatggcagaagaacaagcccgtgtagtccttggctagcctgggagggttgtcattcacatccataaggatcag

SEQ ID NO: 78 - DNA, 223 bp, Homo sapiens
ccttttccacacgcattaatagtcccatttttctcttgccatttgtagctttgcccattgtcttattggcacatgggtggacacggatctgctgggctctgccttaaacacacattgcagcttcaacttttctctttagtgttctgtttgaaactaatacttaccgagtcagactttgtgttcatttcatttcagggtcttggctgcctgtgggcttccccag

SEQ ID NO: 79 - DNA, 561 bp, Homo sapiens
  misc_feature 425, 494, 526, 546, 561: n = A,T,C or G
ctgctttctaggatgggaaggaggcagatctggttcaggatgatgtggaaaatctccattagcttcttcctggaatgggagagcctctgccacaggtcaccaagaagcttgctatcttcaagcctcctcttcttaattgcagactccatttcgggaattgctgcttcgtagaaggaagctagtctgtaacaaaagtcgtgcttctggaaggtctggcaagccaaagggaagatatccagaaaggcccaaagtgtggtgcaggtatcacaaaggtagagaacaatgtcctttaattccaggagaggcatgtcactgggggtcaatcggcccctctcctcaagcttctggggtgtggtattggccccgtccccttgcaaaccacagtgctggaggatattgctgaagacctgaaggatggtaggcanggtttcatccaggtcactgtagtaacttggctgctgtgtaaagatgtttcctatcatcttctggagcangtggtgagttgcctttttcaaagagcacccanaagtccagggtttcttttcntggcttttgaattcn

SEQ ID NO: 80 - DNA, 433 bp, Homo sapiens
  misc_feature 354, 408: n = A,T,C or G
ctgccacctgctcttgtccacggtgagcttgctgtagaggaagaaggagccgtcggagtccagcatgggaggtgtggtcttgtagttgttctccggctgcccattgctctcccactccacggagatgtcgctggggtagaagcctttgaccaggcaggtcaggctgacctggttcttggtcatctcctcccgggatgggggcagggtgtacacctgtggttctcggggctgccctttggttttggagatggttttctcgatgggggctgggagggctttgttggagaccttgcacttgtactccttgccattcagccagtcctggtgcaggacggtgaggacgctgaccacacngtacgtgctgttgtactgctcctcccgcggctttgtcttggcattatgcacctncacgccgtccacgtaccagacctcg

SEQ ID NO: 81 - DNA, 570 bp, Homo sapiens
  misc_feature 242, 264, 440, 482, 495, 528, 562, 563, 568: n = A,T,C or G
ccagaaggaagacttcgaggaagccaggaagaaggcactgaagcttggggccaaaaaggtgttcattgaggatgtcagcagggagtttgtggaggagttcatctggccggccatccagtccagcgcactgtatgaggaccgctacctcctgggcacctctcttgccatgccctgcatcgcccgcaaacaagtggaaatcgcccagcgggagggggccaagtatgtgtcccacggcgccacangaaaggggaacgatcaggtccngtttgagctcacctgctatttgctggccccccagataaaggtcaccgctccctggaggatgcccgagttctacaaccggttcaagggctgcaatgacctgatgaaataggcaaagcaacatcgggttcccattccattcactccccagagtccgtgaagcatagacgagaacctcnttgcctcatcagctatgaggctggaatccttggaaccccaanaaccaagtgcctncaggtctctacatgaagacccaggacccagccnaagccctcaccaccccctgacattctcgagatcnngttcnac

SEQ ID NO: 82 - DNA, 567 bp, Homo sapiens
  misc_feature 534, 567: n = A,T,C or G
aaaatgttcttcaagctttgctttcaatatacctcccagttcttcaaagtgttcattattaaggcatccatctcccattacttcaatgcactttgcaaaagaatgcattatttctgagaggacgtctgaatctggttctgtaccaatggccttaattagagcatcacacataaaatgccacatctgtgtgagatactcaggaccacggactcttgcacactccaggagaagaggcatggattccgctgctgccactcgaacaccatcgtggaaataaaatttcagtaaagggaccatcagtttgacaacctgttcggtgtactccacaaagccttcctttaactccttagcatagcaaaccaacatctggcaagcagttgatttttcttctagtcctgcagttttaataccaaagctttgctgatctccaagggtcacaaattcccaaccatcatcatcactcatattctccatgtcttgggtatctaaaagggctacttcggggcttaattgaagcccgtcttcattaaaggnccccataaccactggaaagtattgctgaaattn

SEQ ID NO: 83 - DNA, 576 bp, Homo sapiens
  misc_feature 39, 50, 53, 75, 82, 98, 101, 110, 115, 125, 150, 188, 201,205, 216, 236, 261, 269, 274, 276, 346, 366, 370, 388, 411,421, 448, 479, 560, 575: n = A,T,C or G
aaaaaaaaaaaactggtctgcaattggcagttgagtttntcctggagccnccnccgcagcagcggctgataaagngcgtgcncggagtttcctaaaanacnccaacgttntcgcnatcggatgcncataactgggtatgtttatacaatntataaaaccttaaagttccttgttttctaacaattccntagtcaaaagttntccnctttggaagcnctaattttgcgtttcattgngcattttggaaaacaacttcggaanactaaatntcccncncttgagtgcgcaacacacaaggatggatgcccagggcgtaaaataaattaaacccaaaccagtgacaganaaaatgcgacgttttagcancgtnttggcagcagggaactanaataatgatgccatatacgggtncctacaattntaccgtatctatctaaagggggagcanaaggggggcggaaaggacacaattttaacanaaagttttcatcaaacaatatggaccgtaggaagtttggaacaacggcggcatttgcaaaccatcaaatgtacctgccatntgaaccaatcgttgnt

SEQ ID NO: 84 - DNA, 234 bp, Homo sapiens
ccagctctggaagtgcaaagccagccttggcctcctcactgggatcccagcccacaagtgatcagcagagttgcatttccaaagaaaaaggctatgagatgagctgagttatagagagaaagggagaggcatgtacggtgtggggaagtggaaaaaaaagctggcgggggagaaggaggctaacctgcactgagtacttcattaggacaagtgagaatcagctattgataatgg

SEQ ID NO: 85 - DNA, 306 bp, Homo sapiens
  misc_feature 150: n = A,T,C or G
ctgcccctcctcccagcagctccagtgtccctgaggccgggggtccccccataaagaaacagaaggctgatgtgacactcagtgctctgaacgactccgatgccaacagtgacgtggtggatattgaagggctaggagaaactcctccancttaaaaaactcaacttcgaccaggacagcctgaccctggatcctggccttctcatgacctctgctgatcctcctctcctctcctgctgagccttccacctctgacctctcactgttcatgccggacctgtggatctcctgggactccgagcaagg

SEQ ID NO: 86 - DNA, 318 bp, Homo sapiens
agatggcaaagtgggcttccagagcttcttttccctaattgcgggcctcaccattgcatgcaatgactattttgtagtacacatgaagcagaagggaaagaagtaggcagaaatgagcagttcgctcctccctgataagagttgtcccaaagggtcgcttaaggaatctgccccacagcttcccccatagaaggatttcatgagcagatcaggacacttagcaaatgtaaaaataaaatctaactctcatttgacaagcagagaaagaaaagttaaataccagataagcttttgatttttgtattgtttgcatcccca

SEQ ID NO: 87 - DNA, 435 bp, Homo sapiens
  misc_feature 150: n = A,T,C or G
aaagctgtcagaatccttttttggacacttatttgaagttatgctaatttcaaattgaacctcatctccaatggaaatattggaacattttcttccattttcccctgttccattcaccccgttcttgcagtaagatttgtaacttattgntacttccttctgacaatttgccgttttccaaaatgacttctgaggaaagggaattgtatgcatcaatgatcaactgaattacattgctagaatttgcagataatgttcctactgctgacttagggatcaagtttttcagctccttgtaaacaggctgaaattcttcagtaactgcaaaaactgagtgaaaattgtctgaatattattttcactcagtttctggacaaggtgagcaatagaaggataatcataataatggctcattgtgtacatattattttccag

SEQ ID NO: 88 - DNA, 293 bp, Homo sapiens
aaactacttaaagcctctgcactagtccaatgagtcaaaggcaagggagaagtaaacctctaaaactgaagaagaccctctaaaggagaaaactatagaagttaaagtatgcatgcttattatactatgggaaaccaagaaggaaggggagaaaaaaaagaaaaagcacagtctatccatccaggacaatcagtaaaaatctacagtaacctgatcaaccaaaaatccttaggtgttgtgaaattacattggtcacttctgttatcttaaaacttaaaatgattgtctcattt

SEQ ID NO: 89 - DNA, 264 bp, Homo sapiens
ctgaacacagaagcttgtgtgcaaagttatggggaactggggcatcgtataaaaagttgggttaaagatgattctgtggtttggttttgttgtgttttgttttgtggctcttcctcagtcacctgaactcaggaaagaaatgcttatcttgatgaaaatatcaacagcccacccacagtaaaaagacaaattctaaaaattaaaaaaaagcgcataattaccaaaaaaagtcactgcttcctccccctccccattttgcttttt

SEQ ID NO: 90 - DNA, 321 bp, Homo sapiens
ctccgtcccccgcgggtctgctctgtgtgccatggacggcattgtcccagatatagccgttggtacaaagcggggatctgacgagcttttctctacttgtgtcactaacggaccgtttatcatgagcagcaactcggcttctgcagcaaacgggaaatgacagcaagaagttcaaaggtgacagccgaagtgcaggcgtcccctctagagtgatccacatccggaagctccccatcgacgtcacggagggggaagtcatctccctggggctgccctttgggaaggtcaccaacctcctgatgctgaaggggaaaaaccagg

SEQ ID NO: 91 - DNA, 208 bp, Homo sapiens
ctgcagggtcccctcgttgtctaccaccctgtagagcagcaacttgttgaggcaagcattgatgagcagtgagggatcccgggcctcgcggctgacccaggaccgggctgagatgctggtcacagggctcccctcatgcaccaccaaacgcttggcttttggtcagcttccctgtgccatgagtactctggtgatggagaaaggaagg

SEQ ID NO: 92 - DNA, 201 bp, Homo sapiens
gtgctccccataagcaatgctgatatcctggtactgttgtgagcttggtgaatataacttacaccttttaatacaggacttatttgactttcaagtcaatagatactgaacacttagtaacaacaacaagggcaagtaatagcagcttcctttttgtcactcctccattcccaaagtgtgccctgagtgtttgcacagtgg

SEQ ID NO: 93 - DNA, 387 bp, Homo sapiens
aaagttagtgattatgaaacaaaaacatattcatagtttcagcttcttttttcttcctcgaccatcaggtgcgccatccattttacgtttctgtgttgaaggctttggtcctcgtttctttttctctgccttctccttttcttctagttccatggtttctctttcaatcaaagtaattaaggtattacatctcctctggagctccattgcagttctggacttaagaaaccagtcaaatctgaactgaggagagttgcgaatacactgtcgcaattcatcataaacattttctttgtcaaatccaagtttgtgaagcatacaaatcagaaaacgatcttcttcttcagtatagttttttcctttgttagtaccatatgatattctcag

SEQ ID NO: 94 - DNA, 233 bp, Homo sapiens
ttttgctagatattgatgtaggtagtaatatttgaaatataatgatgagcaaatattaaattaacatacaaatacggttaatagataagagtttctcttcctaggccatgtgactggatttatactagacataaacttcccccacccagcataattgtatgaaatatttagaattacaagctgggcacggcgttgcacgcctttaatcccatcactttgggaggccgaggcag

SEQ ID NO: 95 - DNA, 268 bp, Homo sapiens
cctgggagatgtatggtacattccacacacccactcgcttccgctgcaccagctccacgtagtcctcggagcgggcgtagtactcatcggggctcagggcgccccagaagttggaccacagcttgccgtggcgggacagcatgggggcgaatcaccttcctgttctcctcaatgaggatacgcagggtctgcaggttggtgaggacagcgtcggcgtccaggctgaagtagaactcacactcggggtcctgccgacacaggtccatgg

SEQ ID NO: 96 - DNA, 178 bp, Homo sapiens
ccacgggtcctggaatcgcctccactgtgaaaactggcgaagaagtaggctttgtggttgatgccaagactgccgggaagggtaaagtgacctgcacggttctgaccccagatggcactgaggccgaggccgatgtcattgagaatgaagatgggaacctatgacatcttctacacag

SEQ ID NO: 97 - DNA, 338 bp, Homo sapiens
aaattacctgaaagacacatttacccatactccaagttacgacatgagccctgccatgctcagcgtgctcgtcaaaatgatgcttgcacaagcccaagaaagcgtgtttgagaaaatcagccttcctgggatccggaatgaattcttcatgcttggtgaaggtggctcaggaggctgctaaggtgggagaggtctaccaacagctacacgcagccatgagccaggcgccggtgaaagagaacatcccctactcctgggccagcttagcctgcgtgaaggcccaccactacgcggccctggcccactacttcactgccatcctcctcatcgaccaccag

SEQ ID NO: 98 - DNA, 373 bp, Homo sapiens
aaagtagctcctttggagaggagattatgatgtgaaagattatgcctatgtgtcttgcagattgcaagatattttaccaatcagcatgtgttacctgtacaattaaaaaaatatttcaaaatgcaatgcatattaaatataatacacacagaaaaaactggcatttattttgttttatttttttgagatggagtttcattcttgttgcccaggctggagtgcaatggcaagatctcagctcactgcaacctctaccccctgggttcaagcgattctcctgcttcagcctcccgagtagctgaggttacaggcatgtgccaccacgcctggctaattttgtatttttagtagagatggtgttgcaccatgttgg

SEQ ID NO: 99 - DNA, 344 bp, Homo sapiens
ccaggctggcttgcagggtgctgctgctggggctacccctgtgtggtctcactagcccttcccactgccagcttggaggccagcagcacccagaccagcagcttccccaaggacttcttgcccctccaccttgcctcaagctactaaaactccaagggtgttacccaataaaacacttggcaccaatccaagctgattttctgaccgatgacttttatcataaacagcagcttctaccacccctttaatactgcatcattctttgggtgtccctaaatgttttcagtattcctataaaatacaatgcggggcagaaacaacatcaaagccactggtgtgatttt

SEQ ID NO: 100 - DNA, 264 bp, Homo sapiens
ccgcgggtctgtctcttgcttcaacagtgtttggacggaacagatccggggactctcttccagcctccgaccgccctccgatttcctctccgcttgcaacctccgggaccatcttctcggccatctcctgcttctgggacctgccagcaccgtttttgtggttagctccttcttgccaaccaaccatgagctcccagattcgtcagaattattccaccgacgtggaggcagccgtcaacagcctggtcaatttgtacctgcagg

SEQ ID NO: 101 - DNA, 409 bp, Homo sapiens
ctgagagaccaggagaagttccagatgcagagactgtgatgctcttgactatggaattattgcggccagtagccaagttagagacaaaacaggcataggtcccgttattatttggcgtgattttggcgataaagagaacttgtgtgtgttgctgcggtatcccattgatacgccaagaatactgcggggatgggttagaggccgagtggcaggagaggttgaggttcgctcccgaaaggtaagacgagtctgggggggaaatgatgggggtgtccggcccatagaggacatccagggtgactgggtcactgcggtttgcactcactgagttctggattccacatacataggctcttgcgtcatttcttgtgacattgaatagagtgagggtcctgttgccattggacag

SEQ ID NO: 102 - DNA, 185 bp, Homo sapiens
ctgcagatagaaggctgcgaggctccccaggggcctccctccctgagttcaaacgcccaagacagagttgatctgattggctagttcaggcccagcctacctgattggacagagcttggtgccaaaccccctcataggctgctggtcaaagccctgtgggggcgtgtggtcaggtgcccaatcag

SEQ ID NO: 103 - DNA, 477 bp, Homo sapiens
  misc_feature 15, 29, 73, 163, 178, 189: n = A,T,C or G
atattttcttgaatnatttagaacatggnaagcctggtattttttaatcaaacaaaatatttatgaaatgggntttctcttaattctggattcatcatggctttctaataccaattgtaatatttacaatattcaccaaaacttagaatttttcaaatgctgnaattctgccagtgtntctttgctaanccttgcatgcaaaatttgaaattttaacattggcacccaaaacctacatggaatgtatgtctggagtatttcaaactttacattgaaacataatttccttggaaaacaaaccataagcctgaggaggtttttatcaactggaatgctttatattagtttgtttttcactgtacattcctcattttacattcatttaacctgccgattatttaatttttttattgaaagtagtttttagcatttgcttttattttttactttgatgccttttcaaattggcatgttttt

SEQ ID NO: 104 - DNA, 575 bp, Homo sapiens
  misc_feature 514, 558, 563, 570: n = A,T,C or G
ctgaagcgagttgatgacaccagggtggatgcagatgacattgtagagaaaatattacaaagtcaagacttcagcctagattccagtgcggaagaagaaggactaaggctatttgtgggtcctgggggaagtacaacctttggcagtcatcatcttccaaatagggtggggtctggagcttatgaacaagttgtgatcaaacgctagaagtcaagtcggtgaaaacatttccttgtggatttaagatgtgagtagttgatgtatcaaggcattttattcaagcacttaatagaaaatgaacctcaactatcaagaggaaagccaatgctggtttcttctctggaaggacccaccgccatcctgtaccagccaccaaaggggaacatctacatggcagtctccaggcactgtgccactgtgtgccttggaagcactgtcctacaatgcctgcttcttgaaagaagtcggcactttctagaatagctaaataacctgggcttattttacctgcccnggcggccgctaagggcgaattctgcagatatccatcacacttgngccgntcgaaantgcat

SEQ ID NO: 105 - DNA, 286 bp, Homo sapiens
ctgacacatggggctctgcacttgagtagggatcatctcctgacccaaagccatagccttcctgcacctccatgggctggctgctgccagagccctgcttgctcaggggccctggggctcttggaggggccatgggtgcagggcctgttgagttagtgccaggacgctctgccacaatcttgccaaaggcctcggcactcttggtccaggcattgaggtcccactgaaacttcatctcgccatgtggctccacgggatccacaatcatcttgagggcccggtgcag

SEQ ID NO: 106 - DNA, 410 bp, Homo sapiens
ctgagagaccaggagaagttccagatgcagagactgtgatgctcttgactatggaattattgcggccagtagccaagttagagacaaaacaggcataggtcccgttattatttggcgtgattttggcgataaagagaacttgtgtgtgttgcttgcggtatcccattgatacgccaagaatactgcggggatgggttagaggccgagtggcaggagaggttgaggttcgctcccgaaaggtaagacgagtctgggggggaaatgatgggggtgtccggcccatagaggacatccagggtgactgggtcactgcggtttgcactcactgagttctgggtttcacatttgtagcttgctgtgtcatttcttgtgacattgaatagagtgagggtcctgttgccattggacag

SEQ ID NO: 107 - DNA, 146 bp, Homo sapiens
ctgcaaagccaacacacaaatgccacaggcagggaagacaccccccgcagacaccaagccttttcctcctgcccaatactgttctctagattcagaaataaaataaaacccttgggagagcagcagtcccggccagccctcggcag

SEQ ID NO: 108 - DNA, 273 bp, Homo sapiens
ctgcattccggctgtgatcggcgggcaacaggtagaggtgctggagggggctgagtcgtgattttcggtgtctgtcatattcgatcaagtgtgccatagagcttcctgtttcatctcccagttattcaaggagaggctggtggctccacctttcccaggaactgtgctgtgaagatctgaagacaggcacgggctcaggcaccgcttgtctggaatgtcaatttgaaacttaaaaagcagcgaccatccagtcatttatttccctccattccc

SEQ ID NO: 109 - DNA, 264 bp, Homo sapiens
ctggaggtgcctcagaaggtgcattctgcttcctgcaggggcttgaaacaccaaggcactccagggatcctggagtcaaagcagcagccccggttgttgcactccttgggggtgacatgggggtagccgcagtccaccctgtccttggctggcaccggacactggtttgcagacaggcccacgtactcctcagcagagctggaggacagcaaggccaggaccagccccagcatgcagagcgctctggcagccatgaccaccgtg

SEQ ID NO: 110 - DNA, 410 bp, Homo sapiens
ctgtccaatggcaacaggaccctcactctattcaatgtcacaagaaatgacgcaagagcctatgtatgtggaatccagaactcagtgagtgcaaaccgcagtgacccagtcaccctggatgtcctctatgggccggacacctccatcatttccccccccagactcgtcttacctttcgggagcgaacctcaacctctcctgccactcggcctctaacccatccccgcagtattcttggcgtatcaatgggataccgcagcaacacacacaagttctctttatcgccaaaatcacgccaaataataacgggacctatgcctgttttgtctctaacttggctactggccgcaataattccatagtcaagagcatcacagtctctgcatctggaacttctcctggtctctcag

SEQ ID NO: 111 - DNA, 577 bp, Homo sapiens
ctgaggtagctatggcttatcgtattttgacttcacaggtgaatctccgctgtcagccaggaatagccaggaatagctaaaatagctccttaagctgtaacatttctcttttccaaccccagcaaaggattggtctagtggtaacaacaaacctcatagaagtagtacacctattattctggagatacttgcttctatagatttattacaatatgttttataaagtattttagagtatataatttgtgtttatgttccacagaaacatattttataggagttaatcttgactatctaaaggtattgtgaactagttccagctttctccaatacccttgtccacgagaagtaaactaaatcatgtatctatttcctctattatctttattaaataataagttaatgtggcctgaatatatacggatttctgatactatggtctattactgagggaaaaaacaccactaaactatcctctaatctgtgtaatagattagctacactttcttcactagcaagataaaataatttccacattttctagttttactttgtagaaataactctctgtaattgg

SEQ ID NO: 112 - DNA, 154 bp, Homo sapiens
aaagacagggtctcactgtgtcacccaggctggaatgtagtggcttgaacacggctcagtgcaaacttgacctcctgggcacaagcgattctcctgcctcagtctcctgaacagcagggaatacagacatgcaccaccatgcctagcttctttt

SEQ ID NO: 113 - DNA, 396 bp, Homo sapiens
cagcagacttatcactggacacactggatgctagaagtaaatggagcaatgtcttcaaagttctgctggaaaaaggctttaatcctagaatcctatatccagccaaaatggcatttgattttaggggtaaaacaaaggtatttcttagtattgaagaaatttagagattatgttttgcatatgcccaccttgagagaattactggggaataatataccttagcacgccagggtgactacaaacaatatgctttcctcccccagcatgcatccaaaaatcaacaagtaaaacgaaaatacacttctacccagaaggatggacagctaatagcgtacttggggatgaggagcaaggaatattacagataatacctagatgttaataaagggtatgttt

SEQ ID NO: 114 - DNA, 344 bp, Homo sapiens
aaagaatcagcaaaatttcaaataaaaaattatgaaaatattatcctcattagttcatttagtcccatgaaattaattattttctctgcttgatcttggtggacagtttcatgaagctgtcagttagttcattaaagttttggaaattctcagacagtgcagtggtatcagaaacttgtattcaagagtacaggtcagagtcttcttttcttttctttttgagatggagtcttgctctgttgccagactggagtgcagtggtgcgatctgggctcactgcaatctccacctcccgggttcaagcgattctcctgcctcagcctcccgagtaactgggactacag

SEQ ID NO: 115 - DNA, 542 bp, Homo sapiens
cgcttcgcctgcaaacgcggtgggggctgctcggcggtcaggagcaggttaccctccgtctgcatgcccaccatcaaggtatgaggatggtagaagctctcgtcgaaccagatggatgaagaccactaacggcttttgtttcctctggtaaccagcaagagacagagcgacatgagagattggaccgcgggctgcactggagaatttactggtaggataattcatccctaaagagattgaagtgagcttcagaatggcaaaagaggagccccagagtatctcaagggacttgcaggaactgcagaagaagctgtctctgctgatagactccttccagaataactcaaaggtggtggcctttatgaagtctccagtgggtcagtacttggacagccatccgtttctggccttcaccttgctggtgttcattgtcatgtcggccgttcctgttggattcttcctgctcatcgtggtgcttaccaccctggctgctctgctgggggtcataatattggaaggccactgacacagcaaaacaccag

SEQ ID NO: 116 - DNA, 469 bp, Homo sapiens
aaaacaagcaaattttattaaaggaaaattttgcaggtttaaggtttgcaggtgaaattttgtaggtgaaaaggtttacttttcaccagtctgttctggcatgcttctaatgatgtcagagtcacctggatcaatgatagccagtgtgcacactctgtagtattttccgcatgctgtgcccagttcaatattattgccactgtagtgatggacaccagttttagccaacatagcatagtactctatttcagatttcctcaaagctgggcagttattagcgagaatgaccaatttcgctttgccttgtctgatcatcttcagagtctgcttgtaccccaggacgtacttcccacttttcataacgagttggagcctagagttgatcgactccagcgactttttcgtcttctttgcggccaccatcttcctgccttaggagcggggcggcccccaaccaacagcagccgct

SEQ ID NO: 117 - DNA, 238 bp, Homo sapiens
ctgctccaaagccagcagcagtgtctcatatggtggagggtccaggaaatcaaagtgcattaggtcatggatccctaagctcttgagcagcaacacgacattgcccaagctggtcctctggatctcaggcactgtggtttcctcaagctcgtgcttgataggcccaggcggtatacaggcggaagcacttccctgcagccacccgacctgccctgccagctcgctgattggctgagga

SEQ ID NO: 118 - DNA, 415 bp, Homo sapiens
  misc_feature 235, 258, 345, 392: n = A,T,C or G
ctgaggtcaggagttcaagactagcctagccaacttggtgaaaccccatgtctaccaaaaatacaaaaattagccaggtatggtggtgtgtgcctgtaatcccagctactagggaggctgagccacgagaatcgcttgaacctgtgaggtggaaggttgcagtgagccgagatcgcaccactgcagtccagcctgggcgacagagtaagactccatctcaagagaaaaaaaaaanatttgatcaaaccaagatttcanaaaaacaaaaccaaaaacactgtgacttggttaacatttatttaattttgggaacacagtaaaaaacagaaacaaaacatctatttnttcacaattgtgaaaatgtctggcttgaaacacctttgacatttatntcactttcgctctcaagtttcag

SEQ ID NO: 119 - DNA, 577 bp, Homo sapiens
  misc_feature 570: n = A,T,C or G
gtgcttgatactttggtcatgtggctaaatacaaaaccttaaaatataaaacgttccagtgtgttgaagccaagtattacagtagtttagggttctcattagatactacagatgtaggcaggaagatctcttgagcctaggagtttaccctgggcaacatagacccttaccttccaaaaaacaaaaaaaagagaaaaatctagcccaagtttaagaattgagaactggactaaattttttgttgctgttgttttctgcagtggtgactgagctcttcaaatggcttgccatttctcaaaatcatttacatccgtatttaggtagtaagacatagtttagatatttatactgtgttgtgctagtggctgttaacagtggaactaattttatggaaaaccaaatgtagttgatactacctctacctgctgtacagttttataattgctcttaggtaataatggtagcgtagatagtatactgatatttgttttgcttagcttttggggaaaatcttatttttacctgcccgggcggccaagggcgaattctgcagatatccatccacttggnggcggtt

SEQ ID NO: 120 - DNA, 207 bp, Homo sapiens
ctgctggtggatgtggtgacggggcagcttggggacgaaggggagcagtgcagcgccgcccacgtctcccgggttatcctcgctggcaacctcctcagccacagcacccagagcagggattctatcaataaggccaaatacctcaccaagaaaacccaggcagccagcgtggaggctgttaagatgctggatgagatcctcctgcag

SEQ ID NO: 121 - DNA, 246 bp, Homo sapiens
ttggtaatttcaagccgatcttctacaaccagacccaaaagcactccttgaacaacttcagttccttgtccttcttcttgataatgtttgattatctttaataccacaaggccatctatctgcacttgcttcacggctgaatctcccgagccgccttttgcctttgcctttccctgctgcgccggcggtggagctggaagaggtggcagtagagccggtaccttccttgcgggacgccatctttcc

SEQ ID NO: 122 - DNA, 406 bp, Homo sapiens
aaatatgtaaatataatacattaggtaatgctattatttatatctgtcttaacataatttaagttgtagctgtgtcttggaaatatttttaaggtaatctatattcacattgcctgtgttaatgctttttccactcatttctagaggcaattttcaccctcccatcctgaggcatctgtattagtctgttctcatgctgctaataaagacatacccgaaactgggtaatttataaaggaaagaggtttaatggactcacagttccacatggctggggagacctcacaatcatggcagaaggtgaatgaggagcaaaggtacatcttacatggcagcaggcaaggaagcatgtgcaggggaactgccctttataaaaccatcagatctcgtgagactattgactacc

SEQ ID NO: 123 - DNA, 596 bp, Homo sapiens
  misc_feature 5, 14, 28, 45: n = A,T,C or G
ggccnggccgacgngtgcatctcattgncgcccttattcctaatncaaagcctcctttgcgtcctcctcttatatccccccaccttaacgccacaagtataagatacctctactccctccttggcgaccgatcatgcaccccttaccatctcattaaaacctaatcacccttaccccgctcaatgccaatatctcatcccacagcatgctttgaaaggattaaagcctgttatcacttgcctgctacagcatgggctcctaaaacctataaactctccttaccattcccccattttacctgtcctaaaaccagacaagccttacaagttagttcagaatctgcgccttatcaaccaaatgttttgcctatccaccccgtggtgccaaacccatatactcttctatcctcaatacctccctctactacccattattctgttctggatctcaaacatgctttctttactattcctttgcacccttcatcccagcctctctttgccttcacttagactgaccctgacacccattaggctcagcaaattacctgggctgtactgccgcaaggcttcacagacagcccccattacttcagt

SEQ ID NO: 124 - DNA, 255 bp, Homo sapiens
  misc_feature 233, 238, 249: n = A,T,C or G
ttgtagaatgtattgtaccttttaacacctgatgtgtacatcccatgtaacagaaagggcaacaataaaatagcaatcctaaagcaagaatatggcagaacaagatctgtaagcacagtcttattttcttttgttgtccagaatacttataattctttgagcctcccagaaattggaagctaaataaagcaactcaagtttccttcaaaaaaaaaaaaaaaaaaaaaaaaaanttttnccccccccccngggggg

SEQ ID NO: 125 - DNA, 332 bp, Homo sapiens
ttgctcggggggctgaggcaggagaatcgcttgaacccgggaggtggagattgcagtgagcccagatcgcaccactgcactccagtctggcaacagagcaagactccatctcaaaaagaaaagaaaagaagactctgacctgtactcttgaatacaagtttctgataccactgcactgtctgagaatttccaaaactttaatgaactaactgacagcttcatgaaactgtccaccaagatcaagcagagaaaataattaatttcatgggactaaatgaactaatgaggataatattttcataattttttatttgaaattttgctgattcttt

SEQ ID NO: 126 - DNA, 405 bp, Homo sapiens
aaaatgacagcacacataatcggcaattcagatcttcagtctgtgccacgcagtaggtgctcagaaaaggtgtcctgagagtgtgaattgctgtgagcgctggttgctgccttgtgttgcagtattcccatggcctgggccagccaagagcaggggactgtgctccaggagcaggcttggctttcactgtggcccaggcccaccccatctgctcacgcactgctttgagtaaacggagtaaatgttgggggcggggtttcccttgagtaagtgtggtgtagggagtgtgcctgtgatggtgattttggctacgcaagtgtctgtttcctttctcctcctgctctgccatagatgctgaggctaatggaaagctgatggtggacggatggttctgtcctgtcattt

SEQ ID NO: 127 - DNA, 582 bp, Homo sapiens
  misc_feature 530, 542: n = A,T,C or G
ctggcaggggtgagggagaaggtcaattgcactgatcaccatgaacttcaagaatttcatcaaaacttttttcccagcttatatttgccttcagaggtgagctgtagattaccatctctgatgctttaacatacaatattcttgttgaaatctcttcaaagagcacagcatgtaaagcactaaactgtgttcagatctgaggagtctgcatggaaagaacctgagacctctctgaaagagccaaaaaccaagtggctgtctcagtgatcacatctattcatcctccacaagacaatgcattgagcttttttaatttacagattttatgttagtcctttagaacccaatgcccatgttccagttcagaactgtcgggctattcaggctgtcttcttggtgcaagctccttggaggtcttgtaaattgatcttcgacctgttgtgaatcatgtgacttttgacaagatgtcctgctgccaatgctgccataagtgacaattccccagccattacggtcccacacacaattcnggcaagctgccnggcattttctccaggaatatctttgcatgctccttgaaca

SEQ ID NO: 128 - DNA, 317 bp, Homo sapiens
  misc_feature 158: n = A,T,C or G
aaaaagcagcagtgtcctatgaagtggaaatgtcagttctagagcattggatgtgaagttctggtcatgtcaccttgcgtgtctcaccctggaggagtgaaggtgggcgcccggcgggggggtgtggctgcaccccagcaccgggagggggcacgcancgacaccagaggaagggacagccccacccatgtcaacagcaggcaacctgtgttttcatttcaagtgggatacagtatttttttaataaggagccatacttttttttaagagtttgagatctgaatgtgatttctaattgtatcagacgttaatgtttt

SEQ ID NO: 129 - DNA, 582 bp, Homo sapiens
  misc_feature 402, 437, 452, 466, 505, 507, 548, 568, 571: n = A,T,C or G
ctggcacgccctgagcccccggctgcctctgccacctcttctgtctcctcttcttcctcttcctcttctccaccttctgaggcacccacacccttcacccgctccccttgggctgccctgtccacgtctccagggccctcctggccccgggcccggaaacgtctgggtcagtgaggtcccatctggcagcctgacctgtatgcgacactggtcatactcccgcttggtgggaggctcctggctgggagaagagggaacaggacctggctctggtgccactgggggtggctgagagcccacactgccaccatacttcttggctctctctgctttgtccctctcgatcttttctctaactctttgtctggctgctaactcctcggccttttccctccgcctctnctcagcagcccggcgcatctcatcttcctgtagcngctgtcgtgcttgcntgaaaactcttgcncttgtctcctgcgctccgttcccgtccaatgcctccccntnctctttttcttcacgctcccgctgcttattgggccaccaanttcaacatcctcttaaattnggnctggtctttcc

SEQ ID NO: 130 - DNA, 116 bp, Homo sapiens
ttgacgctgtaccagtcccccaggtacgtggacctcttctcatcatagtaacaggcgtaggacgactctctggggttggcagcagtagttgcataaacattgatgttatccggcag

SEQ ID NO: 131 - DNA, 198 bp, Homo sapiens
ttgcccaggctggaatgcagtggggtgatttcggctcactgcaaccaccgtctcccaggttcaagtacttctccagtctcagcctctgagtagctgggattacaggcaaccaccatcacgcctggctaatttttgtattttagtagagacgggggtttcaccatgttggcaaggctggtcttgaactcctgacctcag

SEQ ID NO: 132 - DNA, 308 bp, Homo sapiens
ctgaatggagaaatccggcagcaggttgaaaagtctgttctgagaacagattattgctgagcagagctcatgtgacttctagacgtggtgacttaaaaaatggccttaaggctgcagagccagccacctctgcttacaaaaagagtacttagtgcacatgactgtaagaaacaattgtaaaacctcatctagaaatcagaaagcttctaatttctatagaaatgacacctccctggagccgagagacaatctgttgttgattttgaaggacaggcaagaccaacactgtatttagttccatagccagg

SEQ ID NO: 133 - DNA, 262 bp, Homo sapiens
ctgaacagggaggagtctgtgcagtttctgacacttgttgttgaacatggctaaatacaatgggtatcgctgagactaagttgtagaaattaacaaatgtgctgcttggttaaaatggctacactcatctgactcattctttattctattttaagtgggtttgtatcttgcctaaggtgcgtagtccaactcttggtattaccctcctaatagtcatactagtagtcatactccctggtgtagtgtattctctaaaagcttt

SEQ ID NO: 134 - DNA, 343 bp, Homo sapiens
ctgtagtcccagttactcgggaggctgaggcaggagaatcgcttgaacccgggaggtggagattgcagtgagcccagatcgcaccactgcactccagtctggcaacagagcaagactccatctcaaaaagaaaagaaaagaagactctgacctgtctcttgaatacaagtttctgataccactgcactgtctgagaatttccaaaactttaatgaactaactgacagcttcatgaaactgtccaccaagatcaagcagagaaaataattaatttcatgggactaaatgaactaatgaggataatattttcataattttttatttgaaattttgctgattcttt

SEQ ID NO: 135 - DNA, 317 bp, Homo sapiens
gtggaacaccgggctggctttgagtggaacgaggatggggcgggaaccacccccagcccagggctgcagcctgcccacctcaccttcccgctggactatcaccttaaccagcctttcatcttcgtactgagggacacagacacaggggcccttctcttcattggcaagattctggaccccaggggcccctaatatcccagtttaatattccaataccctagaagaaaacccgagggacagcagattccacaggacacgaaggctgcccctgtaaggtttcaatgcatacaataaaagagctttatccctaaaaaaaa

SEQ ID NO: 136 - DNA, 159 bp, Homo sapiens
aaataacttagagacagagttggagggaggggacaggagaggttggggtcacggtggaaggaggaagagagcccactacagccgccgcagcgcccgcttcttgtccgtctttttctcggccgccagcttcttatcgcgctcgccagcatgcttctttgg

SEQ ID NO: 137 - DNA, 264 bp, Homo sapiens
ctgttgatttgccagagaaattccaacagtttcaaaaaactgttcaaagtaagagatgatggcaccaaacacagcaggacttctcggcccttcaggttccttcagggacgccctgagctgtccattcccgtggtgtgcaaggcccaggatggcatcaaccaccctgggtgtgtcaaaatcatctgccaaggccgccttcacggccctcttggtgctggagagcctctcccacagcatcgcttccctgacggagccgcaggccag

SEQ ID NO: 138 - DNA, 263 bp, Homo sapiens
ccaagagttctccactgtgaagactgaaaggacctggtgacatttcggcatcagtcctgttaccacttggaggtaacagaagcaggctcgtgtcctcctttaattctaccacactacatgactcgcaattggttctgaaattagaacgttcaccatcgtacttaaaatcttaggggcatgaagagtcagctagaacaaggaaaaagaaagtcgcaggtagtaggtaagtaggtgggcacatgaaaagccaagctgctctgtcc

SEQ ID NO: 139 - DNA, 459 bp, Homo sapiens
  misc_feature 157: n = A,T,C or G
cctttgcaggaggggccatgggggctgtgaatgggatgcagccccatggtgtccctgataaatccagtgtgcagtctgatgaagtctgggtgggtgtggtctacgggctggcagctaccatgatccaagaggtaatgcactccttttcccatctctncaccatctgtatcctggcccagaaaacttcctcaaccaccaaatttcttcaaggcataacccaatgccatcttgtccgtctataaagcctcccatttttccctggtatgcattccagctcctgccttcaggcttctgtctgtgggtcatagttatctcctccacttgctgggagctccttgaaggcaaagactctactgcctccatctatccagtggaagtggctcttcagagggtgccaagttagtatgtatgactgtcatctctcccaacagggcctgacttgggagggcttccagacag

SEQ ID NO: 140 - DNA, 576 bp, Homo sapiens
ctgggcactgggcttgactgccgccacggagtctccaggaggtccaagagtagggacttctgggtccccatgggagaagccagcctcccaggaccaacctggagaggacttagtacctggtggcacttccttggggacacttttctgcgaaacataattcagagggcacggagctggctgtggtgagaggaggtccagcaaattcctgtctgcagaagggttctgaacaccaccgcctggcagcgtgctggaggagggattcctcttttcctcacagcaattctgaccagaaaccatgcctgtaacaggagcatcactgattcccaaggctgccaggtcctgatgaagcaaagatggcaccacagtccccatctgcgcaggtccattgtccacctccaagtcaatcagggggcaggtcttcatgcagcctgctggattctgaaagactctggagacagggatgtctcccaatgagctggtcactctgtttccaaaggtgacccggccctccatcacctgtttgtacagcacctcggccgcgaccacctaagggcgaattttgcagatatccatcac

SEQ ID NO: 141 - DNA, 386 bp, Homo sapiens
cagtcactttattcaaataatggggagaaaacagagtgggaagagatggggagaaatgtcaacacatacactccacctaacaggaagaaatgcccacactatttctatatattcgctcatttcttagaatgggcaaacaccttttgctaaaagctatatacttttccactcttttcataataaacacttgatgcattctatccgtcacattatttaatcagggacaaagtacctatattatatgattccaaattgtgtgaggaaagtaaaaggctaacactgaaaaataactagcatactatgttcattttcaggtcttagggaaaataacatccaataaattaaatcagtatggcttacttcatttatttatgtatgcttcacag

SEQ ID NO: 142 - DNA, 227 bp, Homo sapiens
ctgttcatcggctgagagggcgtaggaattatatccttcttgctcatcagttgatgatacgcccgagcagatgccaacacagcagccattcaagcaatcctatacaaccgtatcggcgatatcggtttcatcctcgccttagcatgatttatcctacactccaactcatgagacccacaacaaatagcccttctaaacgctaatccaagcctcaccccactactagg

SEQ ID NO: 143 - DNA, 246 bp, Homo sapiens
  misc_feature 128, 134, 135, 157, 167, 214: n = A,T,C or G
ctgctggtgaggctctttcccatctgcctcattcacccaacaggactccaagactgaggcaggcagccttgtgatccccacagctcacaggtgagaggctgctcatacctctcctagcactggaaganccttgnncttgggacccgacacctatggnttttggcccngggagggagaaacggtgccacaggagttgtcttaagaggacaaggcntgcacggtctgagatcagaggttgtgacgtgg

SEQ ID NO: 144 - DNA, 318 bp, Homo sapiens
  misc_feature 139, 150, 151, 153, 162: n = A,T,C or G
ctgaaaaggtagataagctttcctagggagtcccacagtcaagtgagctgcagcataaaatgaatgacatcagagacaggaactctaaccttccctatgaacatccatggcactgacagcattcaggggaacctttcanctattaaaaanncntccaacaanaactcctcacccttcgtctatcctcctttcagaaaggactgaatctgtcctttctaggggagtcccaatattcagactgaaagcactgtaaagtgctgtttataaatagctgcagggtccaaatgctttagtcctggatgctgtgggcactcctca

SEQ ID NO: 145 - DNA, 295 bp, Homo sapiens
  misc_feature 147, 151, 156, 161, 167, 179: n = A,T,C or G
ccttatccaccatcagtcccaggctccaagacctcttttcctgctcgctctctcaatctctcgcccactccatcccaaacttctctccaaatcggggttgagccccttccagccctccataatgccaagcgttccccaagctctttnttanccctngggcnaagganggggcctaattngccaggctgacctgagggcccaggacaagatagcctctgctcagaccaacgtaagtgcccttgagactcaggttgctgctgctgtccaggccctggcagatgactatctggctcag

SEQ ID NO: 146 - DNA, 147 bp, Homo sapiens
  misc_feature 139: n = A,T,C or G
ccttgcccagtgggtagacagctactacacaagcctttgacccccatgctgcttcctgagagtctttttttgcactgttgaaattgggcttggcactcaagtcaaagatgaacatcggaataacaaacattgtcctctncaaaaagg

SEQ ID NO: 147 - DNA, 69 bp, Homo sapiens
ctgaggaaaaaggcgccaataagacaaactcacagatgggatttatctccctcttgctttttttttttt

SEQ ID NO: 148 - DNA, 671 bp, Homo sapiens
  misc_feature 138, 151, 156, 158, 467, 533, 546, 557, 558, 583, 595, 598,628, 635, 641, 651, 656: n = A,T,C or G
ctgtgcacttgggaactagaaacacaaaatctgactctggagggaagctaaggaagcattctactcttgagttgacataagtgcatctgaagcttctgatctccgatgagaacaatgggggacaccaaacagaatatnaaacccctgattngaatncntcaaattggctaacatggcaggtaaacagacatgaggtgaagatggagaagaaggaaacccaggacgaaagtcagcctcgcatttggaacccatttccctgagtttcattgctgaattccagaaggaactactgagatgcaaagaagcacagcagcttttgcacacatgcgtgggattagatggaaaacaagtggattgagggtctgccaatgaaagcgacccatactgaagtccactggctctggttgagacccagaagagtcatgcatcagaataaaggtggacaggaaataccctggcctttgtanggactgagtctgcaccgatgacttcaattgcagcctgtatggaggaccctgaccatcccccaaaanagactcccatctnttctgcagcanngataacacgctactagacctgcccnggcggccgctcnaanggcgaattcttgcagatatccttacacttncggccgntcgagnatgcattctnaaggnccaattccccctatt

SEQ ID NO: 149 - DNA, 401 bp, Homo sapiens
  misc_feature 5, 11, 226, 229, 235, 240, 252: n = A,T,C or G
atatnctcagntcgactcaatctcggatccctagtaacggccgccagtgtgctggaattcgcccttagcgtggtcgcggccgaggtctgcacagtactcctggtttgtcaatgggactttccagcaatccacccaagagctctttatccccaacatcactgtgaataatagtggatcctatacgtgccaagcccataactcagacactggcctcaataggaccacnagncaccancaatncattttttgcanagccacccaaacccttcatcaccagcaacaactccaaccccgtggaggatgaggatgctgtagccttaacctgtgaacctgagattcagaacacaacctacctgtggtgggtaaataatcagagcctcccggtcagtcccaggctgcag

SEQ ID NO: 150 - DNA, 221 bp, Homo sapiens
  misc_feature 141, 152, 157, 191: n = A,T,C or G
gtgggttagaggctgcgtggcaggagaggttcagattttcccctgatctgtaagatgtgtttagaggggaaatggtgggggcatccgggccatagaggacattcaggatgactgaatcactgcgcctggcactcactgggntcttgatttcncattnatagggatcctgcatcgttccttttgacgctgantagagtgagggtcatgttgccattggacag

SEQ ID NO: 151 - DNA, 142 bp, Homo sapiens
  misc_feature 118, 130, 135: n = A,T,C or G
cctgaaaaaagaggtaaacacatcacagaactagatgagagtttcattagactctaactaaaaacagagaggtgtgattactatttccagccagtttccccatcacgatagtcatgtnacaaaccaaggnaatgntcgtctt

SEQ ID NO: 152 - DNA, 626 bp, Homo sapiens
  misc_feature 145, 147, 149, 165, 170: n = A,T,C or G
aaatcatttctagatttcttataatatctaatacaatgcctacacatcacttcatttacatgaattcaacatacttcttggcatgcagcaaattcaagttttgctttttgaaactttgtagattttttttcaaatatttttgatncnangggtgggtggaatccncggcncacagaacccatggatttgaaaggctgactgtatttctattttaggtttgtttttcctcctcagaagcctcaacgaagaaaaagtcaaaggtccttctctctctatgaccagaaataaaacctataaaggaaatagagcactaagtggggtccctggaatccccagcttctggtttccagccacttctagatgttctctggaaacataactgcgttgaaaccatactgaagtataaattcccaaattggaaagaaaacaaacaaacttggtagtctcatgcctgggagatacggaagatggaaaattctggaagaccaataggcactgatgaattctacatctgggcatttcttgagggagagagggcctggctatttggagatggaaaatgtgggggacctagaatgagcaggcccagctagactaacctctttatttaaccaaaccttgggccg

SEQ ID NO: 153 - DNA, 143 bp, Homo sapiens
  misc_feature 134: n = A,T,C or G
ctgcaggagcaggatcagaagcaagcctatgaaaaacaacagaagcatgcagcgactttcttttatagcaccgcagcatcccaggaagcccagaatcatgatgatggcacctacagcaatcaatatgtccacancaacctagg

SEQ ID NO: 154 - DNA, 141 bp, Homo sapiens
  misc_feature 138: n = A,T,C or G
aaaatggctaatcagaataaaaaataaaagggcctctttgtggaggctgggatctcccctatttagaggttagaacccaggtatcccctctacccagcaccatagtgaggtgggctgaggggtaacccccaagggacnatc

SEQ ID NO: 155 - DNA, 152 bp, Homo sapiens
  misc_feature 17, 18, 27, 28, 121, 129, 139, 144: n = A,T,C or G
ttggacgagttggtggnnggatgcagnncagagcctcaagcagcgtggttccactggcattgccatccttacgggtgactttccatcccttgaaccaaggcatgttagcacttggctccancatgttgncaccattccnaccanaaattggc

SEQ ID NO: 156 - DNA, 335 bp, Homo sapiens
  misc_feature 142, 152, 157, 159, 162, 167: n = A,T,C or G
aaagttacgaacagttattagcatgtatttacagacctaagcagaatgagagtttatacattgtttttagttgcctgtatttatagccaaaagtatattaccttaaagttgagatctttctcttcttttcctaaattttggnaaagggggcnttcantnaanaaccntctgggaaaactccaagtataagagaccctggactgatgatggcccagccaagtatatggagggacagagttctctctgtcattaatgaggacatcggttttcacaattgaacctcatgcactgtccacagcatctcacctagctcctgtatctcctgatctgctttt

SEQ ID NO: 157 - DNA, 551 bp, Homo sapiens
  misc_feature 130, 139, 142, 148, 150, 168: n = A,T,C or G
cctggagtcccgacagccggtctgccaggcacccgcctccgcttcctactgctgcttgcattccgccggctggctgggttccttctagaaacgtatgaatgattaacagacaaaaattacaccttggggntaatttccncantattcntnggtttttccctcctggancctttaattcctcctcttctccttcttcaccttcttcaaaattgtcatcatcttctatggcctccccagtgaagtacagcacagcccgcgggactatccgctcacggaaaaagtgtccaatttcaaaatcagaggctaatgtgaattcagaatcttcatccagtgattctccatccccggatgctttcaatggattgaagaagttgaaaaaggactcattgggtacttgtttcgtaattgttctaacagtgcctcgacccttatgcttctgctttttcttgatggtttcgacagtaacattctttcctttcttccagtcaataagtacacccgtcacaagtccacaatctcaggaccttcaaaggaaaagggatcagtcttat

SEQ ID NO: 158 - DNA, 339 bp, Homo sapiens
  misc_feature 124, 126, 143, 152, 170, 172, 213: n = A,T,C or G
ctgctggtggcttgggacatcagtggggccaagggttctctgtccctggttcaactgtgatttggctttcccgtgtctttcctggtgatgccttgtttggggttctgtgggtttgggtgggaananggccatctgccttaatngaaccttgnaacttttccaaaaggccntncggccttgcttgtgtgagcgtgtggacaagtggtggccgcnctgtgcctgctcgtgttgcctacatgtccctggctgttgaggcgctgcttcagcctgcacccctcccttgtctcatagatgctccttttgaccttttcaaataaatatggatggcgagctcctagg

SEQ ID NO: 159 - DNA, 385 bp, Homo sapiens
  misc_feature 133, 137, 144, 148: n = A,T,C or G
ctgaatcccaccaaagtagtagctggacccagtagcctagcttattgtcttggcagtgccccctacccagtaccattagacctggctttgtcccttacataggacagactgggcttctccactcccgccaggntggncctaccntcancctgtctttggaagctagtatgtaagtaagggaggagtcatcaagtttatagatgggtaggctgaggattgaggcaggaggggacttaatggctgagtccctggcttgttccagagccctggcccttgagcccctggactggtcagtgcatggacactctcccctcccagctcgggcggaagacttttcctgacttagctgctccatacacacaatctataaatatgtatttgcttt

SEQ ID NO: 160 - DNA, 147 bp, Homo sapiens
  misc_feature 135, 143: n = A,T,C or G
gtgcggcagctcacacctgtaatcccagcactttgggaggctgaggcaggaagatcatgtgagcctaggagttcgagaccagcctgggcaacacggtgagaccccatttctacaaaaaaataaactgagtgtggnggcatgcncctt

SEQ ID NO: 161 - DNA, 176 bp, Homo sapiens
  misc_feature 149, 152, 159: n = A,T,C or G
gtgaatcagtggctaacctggttagaaactgctgaagaagaagaatcagaggaagaagctgactaaagaaccagccaaagccttaaattgtgcaaaacatactgttgctatgatgtaactgcatttgacctaaccactgcgaaaaatcnttnccgtttnattttttccaaatattc

SEQ ID NO: 162 - DNA, 148 bp, Homo sapiens
aaatgtgtagttgattgaagattcttccgttggaaaggaagcaaagagatttttgactttgctatctgaagactgttcgatatcagagttctttgacagttcacattttttaggttccactttgctttcagatccactctgggcttct

SEQ ID NO: 163 - DNA, 237 bp, Homo sapiens
  misc_feature 138, 141, 148, 157: n = A,T,C or G
ttcatgatcacgccctcataatcattttccttatctgcttcctagtcctgtatgcccttttcctaacactcacaacaaaactaactaatactaacatctcagacgctcaggaaatagaaaccgtctgaactattctgnccngcattantctaagtcntaatgggccctccattccctacgcatcctttacataacagacgaggtcaacgatccctcccttaccatcaaatcaattgg

SEQ ID NO: 164 - DNA, 337 bp, Homo sapiens
  misc_feature 138, 141, 147, 151, 166: n = A,T,C or G
ggtctgctgcaggactaaacccaagcctgatggcaccctcacagtttgcggctggaggtgccttactcagtctgaatccagggaccctgagcggtgctctcagcccagctctaatgagcaacagtacactggcaactnttnaaactnttgnttcttgggggctttnttccaataacatcacttgatgcaactgggaacctggtatttgccaatgcgggaggagcccccaacatcgtgactgcccctctgttcctgaaccctcagaacctctctctgctcaccagcaaccctgttagcttggtctctgccgccgcagcatctgcagggaactctgcac

SEQ ID NO: 165 - DNA, 220 bp, Homo sapiens
  misc_feature 55, 198, 212, 214: n = A,T,C or G
gctcggatccctagtaacggccgccagtgtgctggaattcgccctttgagcggcntcccgggcaggtaaagcaagaacaaactactgctgcaagtttttgtaagtccattttctctgtacatacaaactgctcactactgaagggaaaaaaagaatataatccatggtgtctgctgattcaaaggggagaaacaaggntgtcatttaatatncnaaaacc

SEQ ID NO: 166 - DNA, 739 bp, Homo sapiens
  misc_feature 18, 131, 149, 150, 158, 159, 169, 173, 181, 185, 187, 204,212, 217, 250, 304, 320, 361, 387, 405, 538, 569, 606, 631,636, 657, 659, 669, 671, 677, 688, 716, 722, 729, 730, 734: n = A,T,C or G
aaaaaactcattcaaaanaatgaaaaaaacttaggaaaaaaatttcagaatcaatatgcatgtcagttaaattaatttctgttagccaaaagttcagggaaacggggtttttctgtaataagctcctgacncaaggaatggagggctcnnacctcccnngggggaaaanaccnggagtggnctcncntccttgcctgggggagnacaaaaanaaagnctggctttcttgtttttggagggcccaaaacanagaatactgggaatcttggaagcttcccttggtgtgaaagagaaacaagggcanggtggaaataattagnatataaattcactcatggtaatgctaatgaatagggttganggtaaaccagcagcttttccttcganaaagaaataccatcaaantaccttctaaaagcttatatcctcagcatcattacattattttatatctggtaatttcatactggagaagattccattccttgaaatgcactagcaaaatctgtacattccagtgagttatcctgcccctttnctccaaaagatgccaaagttcatgattaccngacataaaataacaggttctggagtcctgcctttcantggagaataaagggtattgataggngctgnggcatggatgactcgtttctnancgtctattananttgganctgggggaaanttccttgccctaggtcctgagtggaaanatattncctctgnngganaaagg

SEQ ID NO: 167 - DNA, 290 bp, Homo sapiens
  misc_feature 140, 153, 156, 168: n = A,T,C or G
aaaatttatagtaatgacaaatgacttatcagtgttcatcatctgaaagctaagtggttcgttcaatcactttttcaaagttgatagtagattgcatggtttcatgtttcctcatattggtttattaattctatttaatnaaggaaaaaaacnttnagaatccataangtttcagtttatttttagtttactactaggttgagatagcacattacatacttttactatcaaatattattttagcagcttcccatagtaccaaatgatttgattccctactctcatttttt

SEQ ID NO: 168 - DNA, 250 bp, Homo sapiens
  misc_feature 136, 164: n = A,T,C or G
gtgcaagaaaaatatgcagactcaccgggagcctcatcaccagaacagcctaagaggaaaaaaggaagaaaaactaaaccaccacgaccagattccccagccactacgccaaatatatctgtgaagaagaaaaacnaagaagggaaggggaaccacaatttatntttgggagtttttactggcactgctccaggacaaggctacttgtcctaaatacatcaagtggacccagcgagagaaaggcattttt

SEQ ID NO: 169 - DNA, 146 bp, Homo sapiens
  misc_feature 135, 138, 139: n = A,T,C or G
ccaactatgcctctcagaacatcacctaccactgcaagaacagcattgcatacatggatgaggagactggcaacctgaaaaaggctgtcattctacagggctctaatgatgttgaacttgttgctgagggcaacnacnngggtcac

SEQ ID NO: 170 - DNA, 292 bp, Homo sapiens
  misc_feature 149, 160, 164, 172: n = A,T,C or G
aaaaaggcagtaacctacacaaaggtcttatcacaaagaaaagctacttccctggtacgttagcataattttgaattatttcagctaagtagatgttaaagacttgactcaagagtggctgaaaaagaaaggattctctattcccctgntttttttttcncttntatggacnatatagtttctttttgtaagatgcattcattctgactattcttaccagcatttattcttactagcatttgtgacccagaattttcagagcaaacaagcaagcaaaaagcaaaattaattt

SEQ ID NO: 171 - DNA, 151 bp, Homo sapiens
  misc_feature 136, 140, 149: n = A,T,C or G
ctgagagaccaggagaagttccagatgcagagactgtgatgctcttgactatggaattattgcggccagtagccaagttagagacaaaacaggcataggtcccgttattatttggcgtgattttggcgataaaaanaacntgtgtgtgntg

SEQ ID NO: 172 - DNA, 131 bp, Homo sapiens
cctagaaaaagacaactcagagttggggagtgaaactcggtacccactgctattgcctaagggtgtagtcctgaaactgaagccagttgccgaccgtttccccaagaaggcttggagacagaagcgttcat

SEQ ID NO: 173 - DNA, 90 bp, Homo sapiens
  misc_feature 46, 62, 73: n = A,T,C or G
tgaagctcggtaccgagcttcggatccactagtaacggccgccagngtgctggaattctgcngatatccatcnttctggcggccgctcga

SEQ ID NO: 174 - DNA, 472 bp, Homo sapiens
  misc_feature 8, 9, 80, 225, 235, 236, 251, 255, 261, 348: n = A,T,C or G
gcggatanncgtcgtgaaccgagcttcggatccctagtaacggccgccagtgtgctggaattcgcccttgagcgggcttncgggcaggtctgcagcctgggactgaccgggaggctctgaccatttacccaccacaggtaggttgtgttctgaacctcaggttcacaggtgaaggccacagcatccttgtcctccacggggttggagttgttgctggagatgganggcttgggcnncttccggggattacntggnaactgnccgggttgcttcttcattcacaagatctgactttatgacttgtagggtatagaatcctgtgtcattctgggtgacgttctggatcancagggatgcattggggtatattgtctctcgaccactgtatgcgggccctggggtagcttgttgagttcctattacatatcctacaattagactgttgccatccactctttcgcctttgtaccag

SEQ ID NO: 175 - DNA, 752 bp, Homo sapiens
  misc_feature 139, 153, 159, 669, 675, 694, 699, 706, 708, 712, 721, 726,728, 734, 737, 739: n = A,T,C or G
atatgctgaaaccccatctctactaaaagtataaaaaattagctgggtgtggtgggacgcgcctgttgtcccagttacttgggaggctgaggcaggagaatcgcttgaacccgggaggcggaggttgcagtaagccganaacacccccctgcnctccancctgggcaacagagggagactccatctcaaaaaaacaaacaaacaaacaaacaaaaaaacttttgttttaagtggctgagactatgtgctagacttactactgtttaatatgctaaaatgatacataatttattcttcacagctcaaaattcaatgtaaagccaaatattaattttgtccagtagagaaattaaatgtttacaaacaaagtatggaacagttgttggcctatgtaaattgaaatgtaattgaccattttattttcaaacatgcttaatcttcacgtgtctttttcacattgatactcattttgcagaaataagatgactggtactaatttagacaataaacaaactacaccaagccacattttagtaaaagatattttggtggaacgcaaagtaattaacgatgaaaacatttggtaatatccatttactaatatgttaccaagttcttcaatggttacatgacttgctcatattagtaaaaatgcattttacctgcccnggcggncccttcaaaggcgaaatcntgcanaattccntncaanttgggccgntcgancntgcatnttnanggccaattcccct

SEQ ID NO: 176 - DNA, 224 bp, Homo sapiens
  misc_feature 137, 139, 144, 148, 154, 155: n = A,T,C or G
ctgaacgcaaaccagccactttaatcaagctaagcccttactagaccaatgggacttaaacccacaaacacttagttaacagctaagcaccctaatcaactggcttcaatctacttctcccgccgccgggaaaaaangnggganaaanccccgnnaggtttgaagctggcttcttcgaatttgcaattcaatatgaaaatcacctcggagctggtaaaaagagg

SEQ ID NO: 177 - DNA, 294 bp, Homo sapiens
  misc_feature 145, 160: n = A,T,C or G
aaaaacagaaaatctttattgtgccataactgatttttagtatacaaaaaacctaatataacctaatttcctggaccaaataatgtaaaataggccaaaatcaagccacagtacaaaggatactattggatatggacctttttgntttgggtgaaaactncaaagtaaggagacactgtcaatcaattccactaaaattgcatttattttcctgtcatagtaaaaaaggaaaaacagtagcaaatactgggcttcgttttccccctcaacggcacgccttccacaacagcacag

SEQ ID NO: 178 - DNA, 142 bp, Homo sapiens
  misc_feature 138: n = A,T,C or G
ctggcaagagacttcctgaggcacatcagttacgttggtcaatttagggcacggtctggttctgcagctttgaaaggtggactctttctattagcacactttacaagagggattgtaaaggattaactcagtcaccanaaac

SEQ ID NO: 179 - DNA, 366 bp, Homo sapiens
  misc_feature 146, 246, 306, 350, 351, 352: n = A,T,C or G
ccacctgtagccatctgcacacacctccgagacagtccagtgtcacctctctcagagcatctggctgtttagcagaactcattctatccccaatcagctccttttccgttctgttctgctgggagttctagaaccacttcctgctncaagaaggggcctcatgtcctgctggcttccagcttcaggcaccagcatccaccttggctctgccagtggatcccctgcggtcaggctgggcagccccanagagaggatgtggaaagcactttttggctgacttcatctggggttggcaacaggacaganttcacaggaggccagtgggcgggccatgagggacagggtctttnnncatttcttcctcag

SEQ ID NO: 180 - DNA, 104 bp, Homo sapiens
  misc_feature 9, 48, 61, 76, 85: n = A,T,C or G
caaatacanatgtcatggcctgcacacagacagtcctcttgcaaaagntgacctgggcctntgctgaactgggctntaacacctncctggagactagcatccag

SEQ ID NO: 181 - DNA, 393 bp, Homo sapiens
  misc_feature 145, 153, 157, 159, 163: n = A,T,C or G
aaatttatttgtaaaaagttaaatgagagtgggtgtttctctcatgttcactctggcatcttttagcatttttttaatttgataattataggacgttagcatgcatatcgagtttgcccttatgtggtgggagttcaaacacacnaaaaaccncctntntgcncacaactgttcttgctgggtttgggataggctgccatgctttttgaatgttagtacagcctgtatattcattacggaattcagataaaatttccttatgttctgctgttatgtttgatcgaatcctaatcacagcgagctcttcattagctcaatatgcagtttgccctcaagtgcgcggtctattactttgtaatatgccactgtgagtactgacatttacagttgttt

SEQ ID NO: 182 - DNA, 311 bp, Homo sapiens
  misc_feature 138, 143, 150, 157, 163, 165, 170: n = A,T,C or G
ctgatttttcttatgagatggaaaaaaatcagccaagtaagggcacatcttcagttcatttagaagtcagcatccaaggtaaaagaattctctgttggacttgacatcactcccatcctctgatactcgcctactctnttctnaaaaaangttagcnttttcntnccagngaaatattctccataaagcaaatgggttctctactctgaaaaccttgctaaaacccagttccagcataagtctgtctgccacaaactcaatgtattgcttcattagagtgcaattcatcccaatgagcttcacaggcaagg

SEQ ID NO: 183 - DNA, 277 bp, Homo sapiens
  misc_feature 56, 222, 227: n = A,T,C or G
gctcggatccctagtaacggccgccagtgtgctggaattcgcccttagcgtggtcncggccgaggtgtgaagtagcatccacttccttcttcctctttcttgatagggctggtccttttacttttaacttttcttttttaagagtttcagccaggtcttcaagcgttggtatatcttcgaaaatttttattagtttgcccaaaccaacatcaccttcgaacnttttnttccatcaagtcagcaatctgaattttgtcatactcttctcccattttta

SEQ ID NO: 184 - DNA, 322 bp, Homo sapiens
  misc_feature 156, 161: n = A,T,C or G
ctgatgacctcattgatgtggtggaaggaaacagagtttatatcccctgtatctatgtgttaaataagattgaccaagtctccattgaggaattggatatcatctataaggtgcctcactgtgtacccatctctgcccatcaccggtggaattttngttgncctattggaaaagatctggggactatctgaaactagtgagaatttacaccaaacccaaaggccagttaccagattacacatccccagtggtgcttccttactccaggaccacagtggaggatttctgcatgaagattcacaaaaatcttatcaaagaattt

SEQ ID NO: 185 - DNA, 358 bp, Homo sapiens
  misc_feature 20, 151, 152: n = A,T,C or G
aaaatattaagaatggattnaattttaatattcagaataatctgttcaaacctgagtgtattaagactaagtgtacttgacaattgaatgaattaagcctaaaaacatttctctaagaaaccagtggtccatttaaccatttgatgaaacnntatttttattgacttataaaggatagtcagtatactgaaattccacttaaatactgaaatattctactaaatgacattgttttgtctaaatttcctccagaaaaatctgttagcatttcttaaaagtccctcagatttgagggaaattctaaattaggacagttttctctccaaataaatataaatgatcttgagtatttttgttt

SEQ ID NO: 186 - DNA, 161 bp, Homo sapiens
cctcggtctcttggttccttcttggagctgctgcggggccgcgggcgggcgggtcggtctcggctgcttcaccgggttattttataaaagaggaagaaaaaaaataaaagtctccggcgggggagacgcggattttttgtaaatttttttgggggttttta

SEQ ID NO: 187 - DNA, 408 bp, Homo sapiens
  misc_feature 151, 155, 156, 171: n = A,T,C or G
aaaacttaattctcaccttgagtatgcaaaatacaaactccacaaaatgttcattttactttgtagtttacaaatatacaaaatagacgtttgcttaaatttatattacatatttattaaggcaaggaactatatagaaaaacacatttgntttnntttaaggcttacttngggaataaaccattgtacaaattattgcacatctgaaaccacagtgcataacagactgtctgcataaaaatgctaaagaagtaaaccaggtatattacctgacttaggtcataaatgttgatcggaagacaaatatagattttccttgtcaaagtatgcagcagtttgaaaactttggcttccttgtttggtacctttagaaccaagactcaccaagcaccatcatttaggctattt

SEQ ID NO: 188 - DNA, 195 bp, Homo sapiens
  misc_feature 143, 147, 150, 158, 166, 167: n = A,T,C or G
aaataacttgtgctactgaaatcatttttacggaaaaatgagatgtgaatcagttcaagttccagtctaatgagttaatgtctctcactctctggcttcatgccatgtctccgtacatcttcctgtagtacagcgattcaaanaatntcntttgtttnccggaacnnacctgcccgggcgggccgctcgaaaggg

SEQ ID NO: 189 - DNA, 134 bp, Homo sapiens
ctggtggccgagcagagcactctaacaggacaggaagttagaacttagcctttgaacggtctctctgggacacaatggaaagtaatgccatatctcaatatagagaaggtacagtaaaaacatggcataaccaa

SEQ ID NO: 190 - DNA, 125 bp, Homo sapiens
ccattttctccctgacggtcccacttctctccaatcttgtagttcacaccattgtcatggcaccatctagatgaatcacatctgaaatgaccacttccaaagcctaagcactggcacaacagttt

SEQ ID NO: 191 - DNA, 158 bp, Homo sapiens
  misc_feature 142, 145, 151: n = A,T,C or G
cctgaggtgatctgtgaaaatggttcgctattcacttgacccggagaaccccacgaaatcatgcaaatcaagaggttccaatcttcgtgttcactttaagaacactcgtgaaactgctcaggccatcaagggtatgcatatnccnaaaaancccaaag

SEQ ID NO: 192 - DNA, 114 bp, Homo sapiens
aaattatttgagaaaaatattttagaaagttaaaatatgataaatatatttcctcaattagaatgcttcaatatatatttttctaaaaaaaaaaaaaaaaaaaaaaaaaaaagg

SEQ ID NO: 193 - DNA, 147 bp, Homo sapiens
caaaactaactaatactaacatctcagacgctcaggaaatagaaaccgtctgaactatcctgcccgccatcatcctagtcctcatcgccctcccatccctacgcatcctttacataacagacgagggcaacgatccctcccttccaa

SEQ ID NO: 194 - DNA, 214 bp, Homo sapiens
  misc_feature 144, 154: n = A,T,C or G
agaaaggccatactgtgctatagtgaagaggacactttcgtggattcatcggtgactccgggctttgacttccaggagcaatgcacccagaaggctgccgaaggatatacccagttctactatgtggatgtcttggatgggaanctgggcttgngtgaacaagtgcaccaaaggaacgaagtcgcaaatgaactgtaacctgggcacatgtcag

SEQ ID NO: 195 - DNA, 296 bp, Homo sapiens
  misc_feature 21, 75, 207, 220, 228: n = A,T,C or G
agctcggatccactagtaacngccgccagtgtgctggaattcgccctttcgagcggccgcccgggcaggtctcangggccgccgaggatggggcctgcggctgcctgcccaacccgggcacattcgaggagtgccaccggaagtgcaaggagctgtttcccattcagatggagggtgtcaagctcacagtcaacaaagggttgagtnaccattttcaagncaaccacncagtagccctcagcacaatcggggagtccaactaccacttcggggtcacatatgtggggacaaagcag

SEQ ID NO: 196 - DNA, 586 bp, Homo sapiens
  misc_feature 68: n = A,T,C or G
gagctcggatccctagtaacggccgccagtgtgctggaattcgcccttagcgtggtcgcggccgaggngccatccccttatgagcgggcgcagtgattataggctttcgctctaagattaaaaatgccctagcccacttcttaccacaaggcacacctacaccccttatccccatactagttattatcgaaaccatcagcctactcattcaaccaatagccctggccgtacgcctaaccgctaacattactgcaggccacctactcatgcacctaattggaagcgccaccctagcaatatcaaccattaaccttccctctacacttatcatcttcacaattctaattctactgactatcctagaaatcgctgtcgccttaatccaagcctacgttttcacacttctagtaagcctctacctgcacgacaacacataatgacccaccaatcacatgcctatcatatagtaaaacccagcccatgacccctaacaggggccctctcagccctcctaatgacctccggcctagccatgtgatttcacttccactccataacgctcctcatactaggacctgcccgggcg

SEQ ID NO: 197 - DNA, 492 bp, Homo sapiens
  misc_feature 67, 154, 175, 176, 183, 191, 206, 208, 229, 239, 241, 248,300, 302, 305, 310, 316, 321, 323, 358, 362, 390, 419, 422,424, 429, 441, 461, 463, 469, 475: n = A,T,C or G
gagctcggatccactagtaacggccgccagtgtgctggaattcgcccttagcgtggtcgcggccgangtaaacaatagtacaaccctctggttctgttaaaactacatggttttacaccgagtcactcacaaaatttttttttttttaagtaanacttccctgcaacaacagcannggagganaacaacancaacaaaaaaatcanantctgcaggggccttgaaaaancaggagtctncncagtagnggaaaccggaggcttttttttaactttatattctttcccgttttcctccttntntanaacgnggggtntctgngnggccctctgtttgggacggaacggctgcagcgggngaanaaaactgctgccttgggggtgttggggngggggtgttatggatttcttctcccttgngtntntgcancaccgtttcccnaaagtttgagacccccactngntttttnacttgncctcgatccggggtgcc

SEQ ID NO: 198 - DNA, 414 bp, Homo sapiens
  misc_feature 22, 67: n = A,T,C or G
gagctcggatccactagtaacngccgccagtgtgctggaattcgcccttagcgtggtcgcggccgangtgtgccacactggcccttggtgttgttgccaaaccggtggtagggcagcctgacggagaaggacaggccattgtaggagacgaggacacccagctcggggatgtccaccacgtagttgatgccagactggtacacctccagcccgtacttttttgtagggcagtgccaccgcctgcctgttcactaagatgctgtcctcagggctcaagtttgggggcaattgctttgagaggtggttctttcggggcatctgtattgaagcctcaggacacaaagtcctgcctttcagaaccagccgaatgccaaggtctgcgcttgtttgactcccgtaaaagagagcttttgg

SEQ ID NO: 199 - DNA, 361 bp, Homo sapiens
gagctcggatccactagtaacggccgccagtgtgctggaattcgccctttcgagcggccgcccgggcaggtgcagcggggacatgctcactatcaacgggaaggcggtcatctccaataaagacatcctagccaccaacggggtgatccactacattgatgagctactcatcccagactcagccaagacactatttgaattggctgcagagtctgatggggtccacagccattgaccttttcagacaagccggcctcggcaatcatctctctggaagtgagcggttgaccctcctggctcccctgaattctgtattcaaagatggaacccctccaattgatgcccatacaaggaatttgct

SEQ ID NO: 200 - DNA, 409 bp, Homo sapiens
  misc_feature 223, 326: n = A,T,C or G
gagctcggatccactagtaacggccgccagtgtgctggaattcgcccttagcgtggtcgcggccgaagtcgccgccaacatggtgttcaggcgcttcgtggaggttggccgggtggcctatgtctcctttggacctcatgccggaaaattggtcgcgattgtagatgttattgatcagaacagggctttggtcgatggaccttgcactcaagtgaggagacangccatgcctttcaagtgcatgcagctcactgatttcatcctcaagtttccgcacagtgcccaccagaagtatgtccgacaagcctggcagaaggcagacatcnatacaaaatgggcagccacacgatgggccaagaagattgaagccagagaaaggaaagccaagatgacagattttgatcgtttt

SEQ ID NO: 201 - DNA, 499 bp, Homo sapiens
  misc_feature 31, 54, 220, 230: n = A,T,C or G
gagctcggatccactagtaacggccgccagngtgctggaattcgcccttagcgnggtcgcggccgaggtaaagtcctggtacttaacaggctaacgtagataaacaccttaataatctcagttaatactgtatttcaaaacacatttaactgttttctaatgctttgcattatcagttacaacctagagagattttgagcctcatatttctttgatactngaaaatagangggagctagaacacttaatgtttaatctgttaaacctgctgcaagagccataactttgaggcattttctaaatgaactgtggggatccaggatttgtaatttcttgatctaaactttatgctgcataaatcacctatcggaaatgcacatttcatagtgtgaagcactcatttctaaaccttattatctaaggtaatatatgcacctttcagaaatttgtgttcgagtaagtaaagcatattagaataattgtgggttgacagattttt

SEQ ID NO: 202 - DNA, 55 bp, Homo sapiens
  misc_feature 6, 12, 21, 44, 51: n = A,T,C or G
cggaanggaccnttccgaagnaattcccccatccttaatggttnataatcngagg

SEQ ID NO: 203 - DNA, 339 bp, Homo sapiens
  misc_feature 29: n = A,T,C or G
agctcggatccctagtaacggccgccagngtgctggaattcgcccttagcggccgcccgggcaggtaaattctgcaaagaaactctgtcttcttcctcatcactattgagaaaatcagctatagagtcatcatcatctttgttttccacaggctttacggttttggtaggaagagctgatcttatttttttctcaacaggacgagtttcagggttgcactggttctttgtgcttccggaagcagactaccgagcagtagggcacgcggcaggctggacagcggtatttgggcttctccaagcagatcacgcagacgacggtgctacatttgagcgacgc

SEQ ID NO: 204 - DNA, 375 bp, Homo sapiens
gagctcggatccactagtaacggccgccagtgtgctggaattcgcccttagcgtggtcgcggccgaggtccaaaaagaagcccatccaagcactagtagttgaggatgtatgctgccctgccaagagtaatccaataagcatccctgctacttcatcatcagtcaaaggacgcccatccttgtatgtagcatctagtaaagtttggagaatgtcatcaatttttcttgagactgtctgcgtttctggattgccttatagaaaatatccttgatttcccgatgagctctgtccctgcgtctgaaactaggcaaaggcagccaacctggtaagagccaggctgcatggctgaaacctccatccaaatctgcatacag

SEQ ID NO: 205 - DNA, 398 bp, Homo sapiens
  misc_feature 31, 220, 225: n = A,T,C or G
gagctcggatccactagtaacggccgccagngtgctggaattcgcccttagcgtggtcgcggccgaggtaaaaactttctatgagacccctttttctatcaggtagcctcatgatttccctcgattctcctgcctcagcctcctgagtagctgggactataggcgcccgccaccacactggacatcactgtgaaaatgggacgggataaagtccgagaantgttnatgaagaatgcccatgtcacagaccccagggtggttgatcttctggtcattaagggaaagatcgaactggaagaaacaattaaagtatggaagcagcggacacatgttatgcggttcttccatgaaacagaagcgccaaggccaaaggatttcctatccaagttctatgttgg

SEQ ID NO: 206 - DNA, 381 bp, Homo sapiens
  misc_feature 366: n = A,T,C or G
gagctcggatccactagtaacggccgccagtgtgctggaattcgccctttcgagcggccgcccgggcaggtccaggtgcagtggctcacacctgtaatcccaggaatttgggaggccaaggcgggtggtcactagagatcaggagtttgagaccagcctggataacatggtgaaaccccgtctctactagagatataaaaattagctgggtgtggtggaacatgcctgtagtcccagctacttgggaggctgaggcaggagaatcacttaacccgggaggcggaggttgcagtgagccgagattgcgccactgcactccagcctgggcaacaagagcgaaattccgtctcaaaaaaaaaaaaaaangtttatttttttttt

SEQ ID NO: 207 - DNA, 210 bp, Homo sapiens
  misc_feature 66: n = A,T,C or G
agctcggatccactagtaacggccgccagtgtgctggaattcgcccttagcgtggtcgcggccgangtcctggaggccgcccagaagtgatctacaactatgtccaaagaccctttattcgaatgtcctgggagaaggaagaaggaaagagtcggcatgtagactttcagtgtgtaaagagtaaatctatcaccaatcttgcagcagacc

SEQ ID NO: 208 - DNA, 370 bp, Homo sapiens
actggtagaagttccaggaaccctgaactgtaagggttcttcatcagtgccaacaggatgacatgaaatgatgtactcagaagtgtcctggaatggggcccatgagatggttgtctgagagagagcttcttgtcctgtctttttccttccaatcaggggctcgctcttctgattattcttcagggcaatgacataaattgtatattcggttcccggttccaggccagtaatagtagcctctgtgacaccagggcggggccgagggaccacttctctgggaggagacccaggcttctcatacttgatgatgtagccggtaatcctggcacgtggcggctgccatgataccagcaaggaattgggtgtggag

SEQ ID NO: 209 - DNA, 278 bp, Homo sapiens
  misc_feature 65: n = A,T,C or G
agctcggatccctagtaacggccgccagtgtgctggaattcgcccttagcgtggtcgcggccgangtctgttaaacactagccaacaccccattgatgctgttccttctacctgaaacacctcgcattgccggtgagctctaaagacaaaaggacctgggtctgcatttcccaaaggcaagactctggtatcacctgcatattattttcccatatttgagcaccactgccttttgcattatttacttagcagttttgctcctgtcaactcactttttt

SEQ ID NO: 210 - DNA, 346 bp, Homo sapiens
  misc_feature 20, 52: n = A,T,C or G
agctcggatccctagtaacngccgccagtgtgctggaattcgcccttagcgnggtcgcggccgaagtctgacccactccctgggtggggggactgggtctgggatgggtaccctcctcatcagcaagatccgggaggagtacccagacaggatcatgaacacgtttagtgtggtgccttcgcccaaagtgtcagacacagtggtggagccctacaaccgcaccctctcagtccaccagctcgtagaaaacacagacgagacctactgcattgataacgaagctctctacgacatttgcttcagaaccctaaagctgaccacgcccacctatggtgacctgaaccac

SEQ ID NO: 211 - DNA, 283 bp, Homo sapiens
  misc_feature 223, 227: n = A,T,C or G
agctcggatccactagtaacggccgccagtgtgctggaattcgcccttagcgtggtcgcggccgaagtcctcgtcggacccgtccccacagtcgtccttcccattgcactgctgtctttttgaagccccacattctgaatttgtcagattgtttgctcatggtgtcgcataaccacttcttctatcccctgtactttcaaggataatttaggctacatgagantttnccttttgtgctgacttgacagcttcacttctgcctaagatgcgcctccactgtcac

SEQ ID NO: 212 - DNA, 222 bp, Homo sapiens
  misc_feature 29, 205, 215: n = A,T,C or G
agctcggatccctagtaacggccgccagngtgctggaattcgcccttagcgtggtcgcggccgaggtcctatttcactgctgtgtagcctcagtgcctaacatgggtgccaaataaatattcgtagaattacactgaattgtaaaaaccattcgtttttgtttacaattgccaaaaatctcaaaaggccctgtatttatgtaatnctttgaaatnatcattt

SEQ ID NO: 213 - DNA, 547 bp, Homo sapiens
  misc_feature 20, 29, 31, 536: n = A,T,C or G
agctcggatccctagtaacngccgccagngngctggaattcgcccttgcggccgcccgggcatggtctgccgcttctcatcgtaactcatgggcctgctctcttcctcctcctctgaatcataacctgtaggcagggcaggtggggctgtctttgtggcctttttggggagcttggtgccacttcctccagaaggtccaaagccagaagggcctaaagcagcactgccacccccactgccacttgctttcttggacttcttaggttgaggtgggcggggtgccctaggccccttgtcatcttcatcggccccagctcggcctcgatgcttctctgccttccgtttcttctttttctcttttttctctcttttcctcttgggcttggatattggaccctgggacagagcagccagttgttcatgtactgcccgaagctgttcctgtagttctgctaagcgatgagccctttcttcctctgagtctgagctttcactctcttcttcctcctcgtcctcctatcttcctcctcctcttnctcagaagagc

SEQ ID NO: 214 - DNA, 357 bp, Homo sapiens
  misc_feature 21, 60, 67, 89, 90: n = A,T,C or G
agctcggatccactagtaacngccgccagtgtgctggaattcgcccttagcgtggtcttnggccgangtgccccactcatgatgatgtnncctttgaggcagtggcacaggcctttggagatgagctgaagccacaccccaagttggaagcagccaccaaagccctaggaggggaaggctgggagaagctatcattggtgccctcctctgcccgcctgcattatgggacagatccttgcactggtcaacctttcagattccctctggtctccgtccgaaacgtctacctcttcccaggcattccagagctgctgcggcgggtgctggaggggatgaagggactattccaaaacccag

SEQ ID NO: 215 - DNA, 634 bp, Homo sapiens
  misc_feature 17, 30, 53, 205, 210, 222, 549, 550, 593, 596: n = A,T,C or G
agctcggatccactagnaacggccgccagngtgctggaattcgcccttagcgnggtcgcggccgaggtgaagaaatagagacaaactgtataggcacctcttatttaggtcttcttgtctccactataactcttggcaggctttctttgctactgatgaggcagaaataaaactatattgtcagtctcagatttaaaaaacattnatttnaataagactatngcaaacacattaaaaaaactaaatagcaatattacaaaatctatatacttgcacatttagtatttgtcaatgtgccagaggttttcttcatgaaatttgacttctttgaagtgaaggcttttttctatcatctcttatagctctgactgaataagtcttaatgctttcttcatgttttctatcaataggggtaaatcccgaggctcatatgtgtacaatctgttagagtatcttccagctatgtcagctctaactgttaaagaagggtctacaaacatgattctaggcacatattgcccatcaggtgataaattcttatcagtggtnncatgcataagggtttagcatgatgaacttattctgagccattnctngtatttcttcattttgggcaaatacttcctttagagct

SEQ ID NO: 216 - DNA, 456 bp, Homo sapiens
  misc_feature 29, 31, 238: n = A,T,C or G
agctcggatccctagtaacggccgccagngngctggaattcgcccttgagcggccgcccgggcaggtctgctgacggcacctcagccacgccactcttactcagttcagtgggtgtgcttgcgtggtaggatgtggtgcagccctctctacgctcttctatttttggtatatttcctatctaaccttcaaatagcttccaattctttttttcttggactggcttcattctgaatttgngctaaaataatctttcataaagagacctcagtttatagcgtaacagactacacaatgcactgatgttttcataatgtttaagggacccactgcaagaaggttgctgcctccttttaattgtattcatttagattttgattttccatgttaagaaggtgaggtccatgttggtgcccttcagagtagagaaccatgtaaacattaggaatgaacagagg

SEQ ID NO: 217 - DNA, 233 bp, Homo sapiens
  misc_feature 58, 66: n = A,T,C or G
agctcggatccactagtaacggccgccagtgtgctggaattcgcccttagcgtggtcncggccgangtcaggcgcagcccagcctcgaaatgcagaacgacgccggcgagttcgtggacctgtacgtgccgcggaaatgctccgctagcaatcgcatcatcggtgccaaggaccacgcatccatccagatgaacgtggccgaggttgacaaggtcacagggcaggtttaatgg

SEQ ID NO: 218 - DNA, 370 bp, Homo sapiens
  misc_feature 20, 48, 50, 52, 73, 221: n = A,T,C or G
gctcggatccactagtaacngccgccagtgtgctggaattcgcccttngnancggccgcccgggcaggtccangggcgtccacgtggcagacggcaaagtgctgggtgatctcctgcatgtcctcgtagttgaagagggggttgtagcaggttttgtggttcatgccgatgtcatggtaggtgaggatgacaggccggtttcccttgggagtcccacacangcgtgacgtgaacagagccatgtaaagtctcgatgtcctgctcctggacatcaaactcttgcaggaggccggtgatggtctcccctttctccaccaaaggcttcacctcagcgaggtctacatcctgcatctcccgagacatgtccctg

SEQ ID NO: 219 - DNA, 332 bp, Homo sapiens
  misc_feature 220: n = A,T,C or G
agctcggatccctagtaacggccgccagtgtgctggaattcgcccttcgagcggccgcccgggcaggtctgcatcagcttatagttactatcattatggccggaagactgttcaggtgataaaagactgatgaaagtcatccctcactgttagtaaggaagcagtatacatcaatgggaacagggcccatggaaatgtacaggagtttccctattttggnggttcagcttgaaaaaggacttgtcagaatcaactgtgtcatcaaaatttaagtaatgtgcattgaaaataaggttgatcatgggaatatgcagaatttccaatgtattttt

SEQ ID NO: 220 - DNA, 240 bp, Homo sapiens
  misc_feature 22, 55, 62, 64, 68, 81: n = A,T,C or G
agctcggatccactatgtaacngccgccagtgtgctggaattggcccttatgcgnggtcggngncgangtcctcattgttnccctggaggtcctgggctgagaccacggagcagtaatacacaccactgtccccccacgccgtctggtcaaaggtcaggtcagcatttccggtgatggtaatcctccggccctggtagtaatctcccagggtcacagcgttgcccttgcttggtggacct

SEQ ID NO: 221 - DNA, 381 bp, Homo sapiens
  misc_feature 21, 30: n = A,T,C or G
agctcggatccactagtaacngccgccagngtgctggaattcgcccttagcgtggtcgcggccgaagtctgcgcttcctgttccggaagctggcgtccggttttggggaagacgtggacggatactgcgacaccatcgtggctgtggccgaagtgatcaagctgacagacccttctctgctctacctggaggtctccactctggtcagcaagtatccagacatcagggatgaccacatcggtgcgctgctggctgtgcgtggggacgccagccgtgacatgaagcagaccatcatggagaccctggagcagggcccagcacaggccagccccagctacgtgcccctcttcaaggacattgtggtgcccagcctgaacgtgg

SEQ ID NO: 222 - DNA, 636 bp, Homo sapiens
  misc_feature 118, 473, 532, 557, 579, 602, 606, 608, 619: n = A,T,C or G
agctcggatccctagtaacggccgccagtgtgctggaattcgcccttcgagcggccgcccgggcaggtcgcctggctaatatttttttgtatttttagtagagacggggtttcaccgngttagccaggaagatctccatctcctgacctcatgatccgcccgccttggcctcccaaagtgctgggattacaggggtgagccactgcgcccggccgagtctgcattttctgacaagcctcttggtgatttcagtgctgctggtctgagaacggcactcagtagcgagaggctagagattgccatggggcatcttggagaatatcccccagcagagagaaagataaaagaaggctcagccaagcaggcaccatgctgaggataagtaaggattggtcagatgagaagcagtgtttgggtgggcgggggtggcgatggcagaggtgacataatgtggagaccctgaggaaaggcanagagaaagagcttcgactagaattgacaaggaattgctgtcattgccggagtgcagaangagtagatgaaaatatcccgctctnggactgggggttggattaaatnagtccttgacctgcgacacattngatngnagacctcagcncaagtttctcttccggg

SEQ ID NO: 223 - DNA, 235 bp, Homo sapiens
gctcggatccactagtaacggccgccagtgtgctggaattcgcccttcgagcggccgcccgggcaggttatgtaatctcagtttcctcctgtgaagtggggtcgggaatattatgttgcatagagcgatgataagaattagcggaaaaaatgcatgtcagtcgcttaggaggagactggcaaaccctgaatggatgcatgctgtagagtaagaaaatcccctgccgctcagccac

SEQ ID NO: 224 - DNA, 368 bp, Homo sapiens
  misc_feature 65, 222: n = A,T,C or G
agctcggatccctagtaacggccgccagtgtgctggaattcgcccttagcgtggtctcggccgangtctggagaacagcttaagtgcagagacgagaatcaagctggacctgttctccgcactgggcgatgcaaagcggcagctcgagattgcccaaggacaaatccttcagaaagatcaggaaatcaaggacctaaaacagaagatagccgaagtcatggnccgcatgcccagcataacatacagtgccgccaccagccccctgagccctgtttccccccactactcttccaaatttgtggagaccagcccctctggacttgaccccaatgcctctgtttaccagcccctgaagaaatgaaggccag

SEQ ID NO: 225 - DNA, 221 bp, Homo sapiens
  misc_feature 30, 58, 60, 69, 71, 81, 99, 104, 109, 110, 121, 126, 140,141, 178, 197, 216: n = A,T,C or G
agctcggatccactagtaacggccgccagngtgctggaattcgcccttagcgtggtcntnggccgaagngnggtaaggaanaggctagagaataggaanaggcnaaatnngctagagatgngctgnggaattatctgtanntctagctatgatcttagcttcctcaagtccatttcantgcaagaatatgaaaaatnaaattgagatccaggcccnttttt

SEQ ID NO: 226 - DNA, 374 bp, Homo sapiens
  misc_feature 20, 57, 69, 70, 89, 103, 116, 119, 127, 137, 150, 162, 178,180, 184, 210, 212, 227, 244, 266, 267, 303, 357: n = A,T,C or G
gctcggatccactagtaacngccgccagtgtgctggaattcgcccttagcgtggtcncggccgaagtcnngaaggatggtcttgccttnaatgccctgatccnccggctcagaccnaanctgattgngtatgacaanctgaggaaggacnaccctgtcaccnacctgaacaatgcctncnaagnggctgagaaatacctcgacatccccnanatgctggatgctgangacatcgtgaacacggnccggcccgacgagaaggccatnntgacctatgtgtccagcttctaccatgccttttcangagcgcagaaggctgaaactgccgccaaccggatctgtaaggtgctggctgtcnaccaagagaacgagcac

SEQ ID NO: 227 - DNA, 317 bp, Homo sapiens
  misc_feature 29: n = A,T,C or G
agctcggatccctagtaacggccgccagngtgctggaattcgcccttcgggcggccgcccgggcaggtaaaacattttttagtctgtaatacactccacttgaagcacttaagtcttccttaaatgacttttcttaagtaatgatactgtgtgttttcccaaagcacacagtatcattacttaagaaaatttttataaattactatctgttgaaaagggggccttttcctttcttctagtatttttttcttaccaaaattcactaatcttgaatgtttgtgatattaaatttcaaatgcagaatacttgactcattt

SEQ ID NO: 228 - DNA, 477 bp, Homo sapiens
  misc_feature 20: n = A,T,C or G
gctcggatccactagtaacngccgccagtgtgctggaattcgcccttagcgtggtcgcggccgaagtccagcgagcacatgaagcggttcttcgtgaactttgtggttgggcaggatccgggctcagacgtcgccttccacttcaatccgcggtttgacggctgggacaaggtggtcttcaacacgttgcagggcgggaagtggggcagcgaggagaggatgaggagcatgcccttcaaaaagggtgccgcctttgagctggtcttcatagtcctggctgagcactacaaggtggtggtaaatggaaatcccttctatgagtacgggcaccggcttcccctacagatggtcacccacctgcaagtggatggggatctgcaacttcaatcaatcaacttcatcggaggccagcccctccggccccagggacccccgatgatgccaccttaccctggtcccggacattgccatcaacag

SEQ ID NO: 229 - DNA, 366 bp, Homo sapiens
  misc_feature 19, 64, 218: n = A,T,C or G
gctcggatccctagtaacngccgccagtgtgctggaattcgcccttagcgtggtcgcggccgangtccacaccatagatcccccatcagacagatgttgatgttgccccggattttcatgcctcgaggagactggtccacacccccgactagcaggagcagcagtgccttcttcacatcttcatgcccgtatatttctggggcgattgaagctgccancttttcgtagaaatcctcctctgcaatttgcctcagctcctccctggtgagctctccagccccagactcatcatcctcactcttgttcatcttcacaatccgatgggcttccaggtaggtttctgagagtaaaccctgtaccacacct

SEQ ID NO: 230 - DNA, 330 bp, Homo sapiens
  misc_feature 20, 49, 218, 219, 228, 241: n = A,T,C or G
agctcggatccctagtaacngccgccagtgtgctggaattcgcccttangagcggccgcccgggcaggtaaagcttttagagaatacactacaccagggagtatgactactagtatgactattaggagggtaataccaagagttggactacgcaccttaggcaagatacaaaccaactaaaatagaataaagaatgagtcagatgagtgtagccattnnaaccaagcngcacatttgttantttctacaacttagtctcagcgatacccattgtatttagccatgttcaacaacaagtgtcagaaactgcacagactcctccctgttcag

SEQ ID NO: 231 - DNA, 206 bp, Homo sapiens
  misc_feature 20: n = A,T,C or G
gctcggatccactagtaacngccgccagtgtgctggaattcgccctttcgagcggccgcccgggcaggtctgagcgggcacagcgagctggagctcggctactccttggcgcggccaatgatggtgaggatgtacaggaagatgttgatgatgtctgtgtacaggttcagcgcagcaaacacatactcttctgggctcagggacag

SEQ ID NO: 232 - DNA, 468 bp, Homo sapiens
  misc_feature 19, 56, 73, 409, 423, 434: n = A,T,C or G
gctcggatccctagtaacngccgccagtgtgctggaattcgcccttagcgtggtcncggccgaagtctgagangacaggagcacttccagagactgtgatcatcgtgactgtggtcctattgaggccagtggctgagttatgggcttggcacatataggatccgctattattcacagtgatgttggggataaagagctcttgtgtggattgctggatcgtcccattgataaaccaagagtactgtgcaggtgggttagaggctgcgtggcaggagaggttcagattttcccctggacggtaattggcctttgagggggaaatggtggggacatctgggccatagaggacattcagggtgactgggtcactgcggttggtactcgctgggttctgtatttcacattcatnggatcctgcatcgntccttttgacnctgagtagagtgagggtcatgttgccattggaca

SEQ ID NO: 233 - DNA, 508 bp, Homo sapiens
  misc_feature 20, 29, 58, 487: n = A,T,C or G
agctcggatccctagtaacngccgccagngtgctggaattcgcccttcgagcggcctnccgggcaggtccttcaacttttgggacttaatcaagctgctctgcagcgtgcagtatggctcagtgctgtttgtggcttggttcatgggttttggatatggcttcgtgttcacctttctctactggcatttggaagacctcaatggaactacaaccctctttggggtctgttcagtcctgagtcatgtgtctgagctgacagcatatttttttagtcacaagcttattgaattgatcggccacatcagggttctgtacattggcctggcctgcaatacggctcgctatatttatatttcctacctggagaatgcctggactgttctccccatggaagttcttcaaggagtgacacacgcggccatctgggcagcatgcatttcttacctcagtgcagccgttccccctgagctgaggacatctgctcanggcatcctgcaaggccttcac

SEQ ID NO: 234 - DNA, 216 bp, Homo sapiens
  misc_feature 21, 30, 53, 58, 67, 204: n = A,T,C or G
agctcggatccactagtaacngccgccagngtgctggaattcgcccttagcgnggtcntcggccgangtaaaatggaagggaagaataggggcagggcattattaggctatttctgatgcttcagtgttataaattcaacatagaggctgacaacctaaattcatggtgtaacacagctcttttccttttcctttttttttttnggtttctgtcca

SEQ ID NO: 235 - DNA, 412 bp, Homo sapiens
  misc_feature 21, 87, 224, 243, 367: n = A,T,C or G
agctcggatccactagtaacngccgccagtgtgctggaattcgcccttgagcggccgttccgggcaggtccattgctctccagaagngctctgttagcaaacgtgatgtggaaacgatcacagatggtgttttctcgttgttcgccagaatttatacgggggagacaaattcccggtaattaccaagtctgcactcgggtaccaaagctctgaagctctctgancagttgccatacttgagtngatgaatgtgttattcatggtgtctcatctcatcaatgcatcttgagagacttaatgaaattttagcaacagtatagaatagctctatcgggtggggagtaatcattaaacagatgaaatcggncccagatttacatgtctctttagaatccacagtggaagcaaagct

SEQ ID NO: 236 - DNA, 214 bp, Homo sapiens
  misc_feature 20, 157, 203: n = A,T,C or G
agctcggatccctagtaacngcccgccagtgtgctggaattcgcccttagcgtggtcgcggccgaagtctgagaagtggttcacttgtgactggtcatctactggcagttataactcaaaccgggacaatttttatgctacatcagaaaagaggatnaggaaacagtttgataacaaatttgttgaatcagaaagcattcttncactttcattt

SEQ ID NO: 237 - DNA, 176 bp, Homo sapiens
  misc_feature 167, 169, 170: n = A,T,C or G
agctcggatccctagtaacggccgccagtgtgctggaattcgcccttgcggccgcccgggcaggtaaactcttctacatccactaagtcttaggaaaatcgtcaatcctctgctgctttacagtgtccttagattgatattgatcacatcttttttttttttttttncnnaaaggg

SEQ ID NO: 238 - DNA, 526 bp, Homo sapiens
  misc_feature 62, 373, 480, 484: n = A,T,C or G
agctcggatccactagtaacggccgccagtgtgctggaattcgcccttggccgcccgggcangtttgcggcccagcctcataacagggatcatgaaagacagtggaaacaagcctccaggtctgcttccccgcaaaggactatacatggcaaatgacttaaagctcctgagacaccatctccagattcccatccacttccccaaggatttcttgtctgtgggtgcttgaaaaaagaagtttgtctgccatgcgtttcctcaccgccatgaacttggagcatccagagatgctggagaaagcgtcccgggagctgtggatgcgcgtctggtcaaggaatgaagacatcaccgagccgcagagcatcctggcggntgcagagaaggctggtatgtctgcagaacaagcccagggacttctggaaaagatcgcaacgccaaaggtgaagaaccagctcaaggagaccactgaagcagcctgcngatncggagcctttgggctgcccatcaccgtggcccatgtggatgg

SEQ ID NO: 239 - DNA, 411 bp, Homo sapiens
  misc_feature 196, 234, 255, 403: n = A,T,C or G
agctcggatccactagtaacggccgccagtgtgctggaattcgccctttcgagcggccgcccgggcaggtaaagaatcagcaaaatttcaaataaaaaattatgaaaatattatcctcattagttcatttagtcccatgaaattaattattttctctgcttgatcttggtggacagtttcatgaagctgtcagttngttcattaaagttttggaaattctcaaacagtgcaggnggtatcagaaacttgtattcnagagtacaggtcagagtcttcttttcttttctttttgagatggagtcttgctctgttgccagactggagtgcagtggtgcgatctgggctcactgcaatctccacctcccgggttcaagcgattctcctgcctcagcctcccgagtanctgggact

SEQ ID NO: 240 - DNA, 319 bp, Homo sapiens
  misc_feature 6, 20, 29, 59: n = A,T,C or G
agctcngatccctagtaacngccgccagngtgctggaattcgcccttagcgtggtcgcngccgaagtcctgtgctgatgtcgtggatcgagaacgcttctgccgctgggcgggcctacctcgacagggctttcccatcatctttcacggcgtaatgggcaaagatgagcgtgaaggcaacagcccatccttcttcaaccctgaagaggctgccacaagtgacttcctacctgaagctgctcctggccccctccaccaagaagggcaaagctcgcctgagccctcgaagtgtgggcgtcatctccccgtaccggaaacag

SEQ ID NO: 241 - DNA, 97 bp, Homo sapiens
  misc_feature 6, 57, 59, 87: n = A,T,C or G
agctcngatccctagtaacagccgccagtgtgctggaattcgcccttagcgtggtcncngccgaagttttttttttttttttttttncccccggaaa

SEQ ID NO: 242 - DNA, 190 bp, Homo sapiens
  misc_feature 2, 4, 5, 12, 16, 19, 24, 28, 30, 36, 39, 49, 65, 70, 71,78, 82, 91, 95, 99, 111, 113, 139, 151, 164: n = A,T,C or G
ancnnagttccncagntanagccngccngngtgctnganttctgccganatccatctctctggcnggcgnncgaagtngcancgagagggncganttgnccctataccgancncaagtacaattgcactggccgccgcntgacaacgtggngaggccacagcanccttgtcctccacggggttggagtgg

SEQ ID NO: 243 - DNA, 376 bp, Homo sapiens
  misc_feature 6, 21, 59, 67, 238: n = A,T,C or G
agctcngatccactagtaacngccgccagtgtgctggaattcgccctttgagcggcctnccgggcangtttggataacattttgattactacaaagttgttcttcctggcttttgctgaaccagtaaagcaaactcaagattgagcctccatgtaatgaattggggtaaagaaaaaacatgcaggtcaataggttaggttacaaaaggttgttcacacatttatgacagcaggtcctnaactgccaacacctctaaccatctgattaggtttctatgagccaagtcttacatattccattcatcatgaccttttagtcaatgtagcaacagggattccaacattttgctaaggaatggcccgctagggaaactttt

SEQ ID NO: 244 - DNA, 405 bp, Homo sapiens
  misc_feature 6, 21, 53, 60, 61, 222, 260: n = A,T,C or G
agctcngatccactagtaacngccgccagtgtgctggaattcgcccttagcgnggtcttnngccgaagtctctccagaggtgaaaggctattgggcaagtttggatgcatctactcaaaccacccatgaactcaccattccaaataacttaattggctgcataatcgggcgccaaggcgccaacattaatgagatccgccagatgtccggggcccagatcanaattgccaacccagtaggaaggctcctctggtaggcangttactatcactggctctgctgccagtattagtctggcccagtatctaatcaatgccaggctttcctctgagaagggcatggggtgcagctagaacagtgtaggttccctcaataacccctttctgctgttctcccatgatccaa

SEQ ID NO: 245 - DNA, 312 bp, Homo sapiens
  misc_feature 21, 58, 238: n = A,T,C or G
agctcggatccactagtaacngccgccagtgtgctggaattcgccctttcgagcggcntcccgggcaggtccaaaggtcatgatggcaggagtaatcagaggtgttcttgtgttgtgataagggtggagaggttaaaggagccacttattagtaatgttgatagtagaatgatggctagggtgacttcatatgagattgtttgggctactgctcgcagtgcgccgatcaaggcgtagnttgagtttgatgctcaccctgatcagaggattgagtaaacggctaggctagaggtggctagaataaataggagg

SEQ ID NO: 246 - DNA, 634 bp, Homo sapiens
  misc_feature 21, 58, 71, 396, 584, 589, 626: n = A,T,C or G
agctcggatccactagtaacngccgccagtgtgctggaattcgcccttgagcggccgnccgggcaggtccnacaagggaatctacgggtgataaagataagacggtgagagagataaggctagattgtataaggcttgacagaccatagcaagataagcaagaactgtgtcctgttaaccatttatccctaacatctagcatagagttcagttagtaaaagccataaaccctttgagtcttctggcaagataagtaattagcacagattattgtcactcactgcaactcagccttggagggagtacacaaatcagaaggaggtcaagtgtctgggaaattaaatgacggcacctgcaagaacagatcattgttggggtaagaaatggaagcccagngtagaaaaggatagaatgccatggggttagaggtagcagaggctgggacagaacttgtctgttctgccccctttcacccctcctgttctttgccttatgtccaacccatcacttgctggggtagtcagcctagttgaacaggtttagacaaccctagagttctctccaggagaattaatactgagaangagangttctaccattgtcactctggtgaaacacagattctnactcagag

SEQ ID NO: 247 - DNA, 325 bp, Homo sapiens
  misc_feature 21: n = A,T,C or G
agctcggatccactagtaacngccgccagtgtgctggaattcgccctttgagcggccgcccgggcaggtccgggcaggtaaaggcagacactgagtcagtattaatagattaactaaactgcactgtaatttagataaaattactgtgtctcactgtgtattacatgcaaaatccacataaattgtcatttaaccaacagtactgcacgagcgaacatctcgatatatgaaaactgcatcatcaattcaacgttttggtacttgaaactgcatcataaatgcaacattgtcatatgtgaaaacgacaccctaagtccttcttttt

SEQ ID NO: 248 - DNA, 638 bp, Homo sapiens
  misc_feature 226, 481, 600, 632, 634: n = A,T,C or G
gagctcggatccactagtaacggccgccagtgtgctggaattcgcccttagcgtggtcgcggccgaggtaaaagttttattaaaaagaaaaacagaacaagacacactcacacccagatgactaatgaaggctaagcagaatagtctgagtttgctgagactaaagcagggatagtgttgaaaagttttcctttcactagtgggacacattccccttttcttttcnaagaggaagaacatggtgtcatccaatgtgaagtgagcagtttcgggtcaaactcttatggtaagaaactaaaaaaagatgccaagagacaaaccttcagaaatagaagaaatgcaaaagatggaataaaaaccctgatcattaaaacagagacaccttcactggtgtccaataaggattctctttacaaaacagaaacaaacaactcaaaaatttaccatactttgtaatgaaaataccagtatgttgaagacncagcagactgggtttctattagaacaagtatcagcaaggtcatgtagacttgtagaaacttttgccttctcctgcaccagacagatcattgtccagacctgcccgggcggccgctcaanggcgaattctgcagatatccatcacacttggngncgct

SEQ ID NO: 249 - DNA, 178 bp, Homo sapiens
  misc_feature 6, 21, 30, 53, 60: n = A,T,C or G
agctcngatccactagtaacngccgccagngtgctggaattcgcccttagcgnggtcgcngccgaagtctggcctcttgagtctgctgggggaccccaaagttggtggtcccatagcctgccctcctgggtctccacctcatgcctggacaggacgctgtggcctgtccgggccttgg

SEQ ID NO: 250 - DNA, 477 bp, Homo sapiens
  misc_feature 21, 76, 82, 91, 99, 238, 243, 249, 265, 267, 312, 332, 351,352, 362, 376, 404, 417, 442: n = A,T,C or G
agctcggatccactagtaacngccgccagtgtgctggaattcgcccttagcgtggtcgcggccgaagtctgagagnccaggngaagttccngatgcagngactgtgatgctcttgactatggaattattgcggccagtagccaagttagagacaaaacaggcataggtcccgttattatttggcgtgattttggcgataaagagaacttgtgtgtgttgctgcggtatcccattgatncgccnagaatnctgcggggatgggttngnggccgagtggcaggagaggttgaggttcgctcccgaaaggtaagncgagtctgggggggaaatgntgggggtgtccggcccatnnaggacatccngggtgactgggtcnctgcggtttgcactcactgagttctggnttccacatacatnggctcttgcgtcatttcttgtgacnttgaatagagtgagggtcctgttgccattggacag

SEQ ID NO: 251 - DNA, 561 bp, Homo sapiens
  misc_feature 6, 21, 67, 250, 539: n = A,T,C or G
agctcngatccactagtaacngccgccagtgtgctggaattcgcccttctaatacgactcactatanggctcgagcggccgcccgggcaggtcttagcggctgctgttggttgggggccgtcccgctcctaaggcaggaagatggtggccgcaaagaagacgaaaaagtcgctggagtcgatcaactctaggctccaactcgttatgaaaagtgggaagtacgtcctggggtcaagcagactctgaagangatcagacaaggcaaagcgaaattggtcattctcgctaacaactgcccagctttgaggaaatctgaaatagagtactatgctatgttggctaaaactggtgtccatcactacagtggcaataatattgaactgggcacagcatgcggaaaatactacagagtgtgcacactggctatcattgatccaggtgactctgacatcattagaagcatgccagaacagactggtgaaaagtaaaccttttcacctacaaaatttcacctgcaaaccttaaaacctgcaaaattntcctttaataaaatttgctcgg

SEQ ID NO: 252 - DNA, 284 bp, Homo sapiens
  misc_feature 126: n = A,T,C or G
ctggcaaggtcaaatgaggtgttttcccaaccttatgccttgggtcttcatctgagtcagcagaggccatctccattgacacagcgtgctcagcagagacaaccaagaacccgtcactttgagcangttgagtcttatttgttttattttgctcatagtgactcttcagcagtgcaaatactctatctaaatccttcaagtaattagtccagtccaccagactaagtctgtagttttgtctgtactcatagatgttttcattcacactgtgtagctcctctagg

SEQ ID NO: 253 - DNA, 656 bp, Homo sapiens
  misc_feature 491, 564, 566, 595, 640, 645, 648: n = A,T,C or G
ctgacatgggtgaaccccagggatccatgcgggttctagtgacagggggctctgggctggtaggcaaagccatccagaaggtggtagcagatggagctggacttcctggagaggactgggtgtttgtctcctctaaagacgccgatctcacggatacagcacagacccgcgccctgtttgagaaggtccaacccacacacgtcatccatcttgctgcaatggtggggggcctgttccggaatatcaaatacaatttggacttctggaggaaaaacgtgcacatgaacgacaacgtcctgcactcggcctttgaggtgggcgcccgcaaggtggtgtcctgcctgtccacctgtatcttccctgacaagacgacctacccgatagatgagaccatgatccacaatgggcctccccacaacagcaattttgggtactcgtatgccaagaggatgatcgacgttcagaacaggggcctacttccacagtacggntgcaccttcccacttgtcatccccaccaacgtctttgggcccacgacaactttaacatcgaggatggaacttngncgcgaacactctaaggcgaattccacccnccttcgccgtactagtggatcgacttcgtcccaacttggcgtatntggcntanctgttttc

SEQ ID NO: 254 - DNA, 190 bp, Homo sapiens
ccacagcaggactacagtcaagacaatcacagtctctgcggagctgcccaagccctccatctccagcaacaactccaaacccgtggaggacaaggatgctgtggccttaacctgtgaacctgagattcagaacacaacctacctgtggtgggtaaataatcagagcctcccggtcagtcccaggctgcag

SEQ ID NO: 255 - DNA, 446 bp, Homo sapiens
  misc_feature 281, 306, 388, 391, 410, 412, 419, 427: n = A,T,C or G
cggatgccgcgcttgcgcctctttcatcttcccatcatggccgccgcctgtgcgcctctgctgagtcgtatgtatttccctcctgacattttttttcagatgttccagtcgctttatggcctcaccaacagaaaatgagaattaaaaagaatttgtcaaactatctttaataatgccccttcactctgcctgtgacgtattagtgacctctgagctagagtcttgtagtcacttcctggtgacccctgaccccgttgatttccgtccgctaggttgctctncccatggcgttttgctggttatganatttgcggaacgccgtggtggggggtaaagggcaccaaacctcggccgcgaccagctaaggggcgaattcagcacacttggnggncggtactaatgggatcccnanctcggtnccaaactnggcgtaacatgggcataac

SEQ ID NO: 256 - DNA, 315 bp, Homo sapiens
ctggagagaaataagcccatcatccacgtagatcttgctgcccacttccaccaccttgcagatgttcttgtagtccagccacaggatgttctcgtcacacttttccatgtaggcgttatccagccgtgatttttgagagtggctcccttcttcagctccacctctgcagtgccgctgcccttgatgagcccagttcggatctcaggtcactaggtgcaccatgtttcacggttttcgtggcaagcattgtgctatcggccccttgaggaataattttgctagcagatgtagccactgaagttcccatcacaccag

SEQ ID NO: 257 - DNA, 524 bp, Homo sapiens
  misc_feature 304, 381, 487, 490, 507, 510, 517: n = A,T,C or G
cctctaagctccagcttcctctgggttcctgaaagtgtgaattcctgggggtccagcagcttcccagaatccaccaccgttactagaaagctgtcaaaggcattctccgatgccatccaggaaactgtgaacccgtagggattaatgtcggaaatggttaggttttccagaaggggcagggcctctgtcgtggctgtggcactgatggttttggtccggatgctgggagcaagtccagagaggtagacaataaaatcagtactagggggtagccctgagatatgggcagttcgttcagcaccanagatattatattccacagtctccagcaacctattggaatcaataatttcaatggtaaagttctcgaagatcccatcngtagccatccaggagagattgaagcttttcgggagttatgtcagaaacatttaagtttccaatttcaggttctttggctgtggaggacttgcccgggcgggccgcntcnaaagggcgaaatccacncancttggcnccgtact

SEQ ID NO: 258 - DNA, 261 bp, Homo sapiens
gtttttgacaaaacaaacaggccaaaagggggctgacctggagcagagcatggtgagaggcaaggcatgagagggcaagtttgttgtggacagatctgtgcctactttattactggagtaaaagaaaacaaagttcattgatgtcgaaggatatatacagtgttagaaattaggactgtttagaaaaacaggaatagaatggttgtttttatcatagtgtacacatttagcttgtggtaaatgactcacaaaactgatttt

SEQ ID NO: 259 - DNA, 190 bp, Homo sapiens
aaagtttttaattaaaaactacagaagggagtaaacagcaagccaaatgatttaaccaaatgatttaagagtaaaactcactcagaaagcattatacgtaactaaatatacatgagcatgattatatacatacatgaaactgcaattttatggcattctaagtaactcatttaagtacattttggcattt

SEQ ID NO: 260 - DNA, 692 bp, Homo sapiens
  misc_feature 572, 616, 637, 642, 654, 670: n = A,T,C or G
aaatctggttggggcagtctgcagatgtttgaagtagtttagtgttctagaaagagctattactgtggatagtgcctaggggagtgctccacgccctctgggcatacggtagatattatctgatgaattgggaaaggagcaaaccagaaatggctttattttctcccttggactaatttttaagtctcgattggaattcagtgagtaggttcataatgtgcatgacagaaataagctttatagtggtttaccttcatttagctttggaagttttctttgccttagttttggaagtaaattctagtttgtagttctcatttgtaatgaacacattaacgactagattaaaatattgccttcaagattgttcttacttacaagacttgctcctacttctatgctgaaaattgaccctggatagaatactataaggttttgagttagctggaaaagtgatcagattaataaatgtatattggtagttgaatttagcaaagaaatagagataatcatgattatacctttatttttacaggaagagatgatgtaactagagtatgtgtctacaggantaataatggtttccaaagagtttttttcctcggccgcgaccacnctaaggcgaatttccaccacncttgngggcggtctagnggaaccgaacttggtnccaaacttggcgtaatctgggc

SEQ ID NO: 261 - DNA, 356 bp, Homo sapiens
ttgtctttccacagtagtaaagctttggcacatacagtataaaaaataatcacccaccataattataccaaattcctcttatcaactgcatactaagtgttttcaatacaattttttccgtataaaaatactgggaaaaaaattgataaataacaggtaagagaaagatatttctaggcaattactaggatcatttggaaaaagtgagtactgtggatatttaaaatatcacagtaacaagatcatgcttgttcctacagtattgcgggccagacacttaagtgaaagcagaagtgtttgggtgactttcctacttaaaattttggtcatatcatttcaaaacatttgcatcttgg

SEQ ID NO: 262 - DNA, 366 bp, Homo sapiens
  misc_feature 265, 285, 338, 348, 349: n = A,T,C or G
ccattcatgtgcagctctttgtcaccatgggccggatgagttgtgctcctcctggctcaccatttccccctgctcccccacagccggttctgcacttatcaccgagtcgcccctggaagcagattcccattgagttttccccaccaaggggaccatgcacatggtagaaacattagattctgcattgacagtagcctttccttggcccgggcctgtggtgggaagacgggcaacaagtataccccaccagggcctgagtgactanaggaagaggacgaggacctnggccgcgaccacgctaagggcgaattccagcacactggcggccgttactagtnggattcgagnntagtaccaagctttggt

SEQ ID NO: 263 - DNA, 389 bp, Homo sapiens
  misc_feature 128: n = A,T,C or G
tgctagggaggatgtcgggttcgtcgctgcccagcgccctggccctctcgctgttgctggtctctggctccctcctcccagggccaggcgccgctcagaacgagccaaggattgtcaccagtgaaganggtcattattcgagacagccctgttctccctgtcaccctgcagtgtaacctcacctccagctctcacacccttacatacagctactggacaaagaatggggtggaactgagtgccactcgtaagaatgccagcaacatggagtacaggatcaataagccgagagctgaggattcaggcgaataccactgcgtatatcactttgtcagcgctcctaaagcaaacgccaccattgaagtgaaagccgctcctgacatcactgg

SEQ ID NO: 264 - DNA, 409 bp, Homo sapiens
  misc_feature 139, 218, 223, 261, 398: n = A,T,C or G
cctgggatggctcttgggcttgagggcctgttctggcaggatggcaagcagacactggacagggtcacttgggcggccgatatgccagcttccgactcttcaggactgaccacttgtgccgctttatggtgtagaccangggcaccagcagagccatcatcatcaacatcttgagccccatgcgttttcgatggtcgtgctctggctcagatgcccancgcangaaggtgcacacatccttggctatctgggacatggtanctggggtgccatcgtcaaactctaagacatctgtgtagatgggaggggccatggcaatggcctggacctgcccgggcggccgctcgaagggcgaattccagcacactgcggccggtactagtggatcccagctcgcnaccaaacttgg

SEQ ID NO: 265 - DNA, 161 bp, Homo sapiens
ctgctgacaagtggagctttggaaccacgctctgggaaatctgctacaatggcgagatccccttgaaagacaagacgctgattgagaaagagagattctatgaaagccggtgcaggccagtgacaccatcatgtaaggagctggctgacctcatgacccgc

SEQ ID NO: 266 - DNA, 455 bp, Homo sapiens
ggagctccaggcccacttgggattgctgggatcactggagcacggggtcttgcaggaccaccaggcatgccaggtcctaggggaagccctggccctcagggtgtcaagggtgaaagtgggaaaccaggagctaacggtctcagtggagaacgtggtccccctggaccccagggtcttcctggtctggctggtacagtcactacaggagcggaagagagcaggcttctcttccccgtggaagaattccccgtggccccacccacttcccccagtgcgtacgtcaggctccagttcactgtgggatgcccagacaagccctgggcaggttccctcaccgacccaaaagcatctaatgtaaacattcttgggacgcttggagattctccagggaccccattttatctgcctaagcatttggctgtctcatgttaaggtatcatccagccctcgtggct

SEQ ID NO: 267 - DNA, 261 bp, Homo sapiens
  misc_feature 133, 168: n = A,T,C or G
gtggcctgcgtcttttttctcttcccttcccagaccaggaaaggcttggctggtgtatgcacagggtgtggtatgagggggtggttattggactccaggcctgaccagggggcccgaacagggacttgtttanagagcctgtcaccagagcttctctgggctgaatgnatgtcatgtgctataaatgccagagccaacctggacttcctgtcattttcacaatcttggggctgatgaagaagggggtggggggagtttgtg

SEQ ID NO: 268 - DNA, 111 bp, Homo sapiens
ccacagcaggactacagtcaagacaatcacagtctctgcggagctgcccaagccctccatctccagcaacaactccaaacccgtggaggacaaggatgctgtggccttcac

SEQ ID NO: 269 - DNA, 289 bp, Homo sapiens
aaaagttgaatcattacttgactaacagacttcggtccaccatgtccttttcacagccctcttctggaacagtcaccttgttaattttatttttgaaaattattttcccactctgccctttacttctgactttcctttcctagtttgttcctgccattctgtttttataagtggctacacttgccttctgaatgattgaaagaaacttttacatcttttcttccaaaataaaagtaacaagctgactgtgattcttaaattgagaccagagcagcaaacgtctcacttt

SEQ ID NO: 270 - DNA, 538 bp, Homo sapiens
  misc_feature 527: n = A,T,C or G
ctgaacatctgcagcaaggtcaaggccgaggtgcagaatctcggcggggagcttgttgtctctggggtggacagcgccatgtccctgatccaggcagccaagaacttgatgaatgctgtggtgcagacagtgaaggcatcctacgtcgcctctaccaaataccaaaagtcacagggtatggcttccctcaaccttcctgctgtgtcatggaagatgaaggcaccagagaaaaagccattggtgaagagagagaaacaggatgagacacagaccaagattaaacgggcatctcagaagaagcacgtgaacccggtgcaggccctcagcgagttcaaagctatggacagcatctaagtctgcccaggccggccgcccccacccctcggggctcctgaatatcagtcactgtttgtcactcaaatgaatttgctaaatacaacactgatactagattccacagggaaatgggcagactgaaccagtccagactgcccgggcggccgttaaggcgaattccacaccctttnggcgttactaa

SEQ ID NO: 271 - DNA, 220 bp, Homo sapiens
agaacatctttgcgttttctaccggctccccatcatcgtactagggaggaagaagcgggtgagaaacaaaacttctttccattgtcctgcccgtttctgcggacttgttctgaggccgaggcacctctaagatactgatggctctgcagaggacccattcattgcttctgcttttgctgctgaccctgctggggctggggctggtccagccctcctatgg

SEQ ID NO: 272 - DNA, 238 bp, Homo sapiens
aaaatatgtttattttgtatgttttacaatgaatacttcagcaaagaaaataattataatttcaaaatgcaatccctggatttgataaatatcctttataatcgattacactaatcaatatctagaaatatacatagacaaagttagctaatgaataaaataagtaaaatgactacataaactcaatttcagggatgagggatcatgcatgatcagttaagtcactctgccacttttt

SEQ ID NO: 273 - DNA, 504 bp, Homo sapiens
  misc_feature 222, 413: n = A,T,C or G
ctgtaacccagacttacggtggcaactcaaatggagagccatgtgtcttaccattcacctacaatggcaggacgttctactcctgcaccacagaagggcgacaggacggacatctttggtgcagcacaacttcgaattatgagcaggaccagaaatactctttctgcacagaccacactgttttggttcagactcgaggaggaaattccaatggtgccttgngccacttccccttcctatacaacaaccacaattacactgattgcacttctgagggcagaagagacaacatgaagtggtgtgggaccacacagaactatgatgccgaccagaagtttgggttctgccccatggctgcccacgaggaaatctgcacaaccaatgaaggggtcatgtaccgcattggagatcantgggataagcagcatgacatgggtcacatgatgaagtgcacgtgtggttgggaatggtcgtggggaatggacatgcatttgcctactccca

SEQ ID NO: 274 - DNA, 388 bp, Homo sapiens
caagagctgatttggcctctgtgctcccctccgcaaggggatcgttttctccagaagagctggatattctttcgcccagttatggcagacaagttaacgagaattgctattgtcaaccatgacaaatgtaaacctaagaaatgtcgacaggaatgcaaaaagagttgtcctgtagttcgaatgggaaaattatgcatagaggttacaccccagagcaaaatagcatggatttccgaaactctttgtattggttgtggtatctgtattaagaaatgcccctttggcgccttatcaattgtcaatctaccaagcaacttggaaaaagaaaccacacatcgatattgtgccaatgccttcaaacttcacaggttgcctatccctcgtccag

SEQ ID NO: 275 - DNA, 344 bp, Homo sapiens
ccactggctgagttattggcctggcaggtatagagtccgctgttcttctcagtgatgttggagataaagagctcttgtgtgtgttgctggatgttcccatcaatcagccaagaatactgtgcaggtgggttagaggctgcatggcaggagaggctgaggttcacccctggacggtaataggtgtatgagggggaaatggtggggtcgtctgggccatagaggacattcaggatgactgggtcgctgtggtcaacacttaatttgttctggattccacactcatagggtcctacatcattccttgtgacactgagtagagtgagggtcctgttgtcattggacag

SEQ ID NO: 276 - DNA, 418 bp, Homo sapiens
aaatatcacaagtaggtcttaagtgtcatctggcatcttctttctgtagccaggtaactcttagatcttattcatcagcctgctgaacagttcctttttcagagacatagataccatccaaaaatttcctgacatccttgtttttaactgttgtggcttgctgaatcaaagccgctgaatttgaaacaagctcaatgtcatttccttcaaggattaattcatctttctgggcttgagatactgaacaagcaacacctggtctcatccgaaccctgcggatgtatttttcacccaagaaatttcggatttcaacaagagacccattctcctggataacaacgttgatggggaagtgagcatacacagacctcatcttgtaacggaagcccagtgtaacacccttgatcatgttctgtac

SEQ ID NO: 277 - DNA, 758 bp, Homo sapiens
  misc_feature 486, 539, 564, 605, 614, 632, 644, 659, 671, 690, 692, 700,711, 716, 717, 726, 730, 734, 741, 743: n = A,T,C or G
aaatgaaattttgtcacattctatggaaaatggtttctggtaaactgagaaggatattaaaataagtggcttttttctgggctaccattattgtttgatttctctttgtcaagtgtatagaacctgtcatacattcatgataagtagcactgaaaaattactcattcaaatttcccctgggcacgtaaggcaaaatattgccggttgggatttcaaggtcagtgacgacgcatttcctcccagtacagaccccccagccccccttgctggacatggggaggcagagagtcacttgaccatccagaaatacatgactacaagtcctttatgaccgtttgccattttttttaatggtacttagtattttgatcaaactttagtctccagaactaaacaagtccctaagtttccttattttaatttactgtgactagatttgaagcaaataaatactccagatccatgcagctagaacacacttgcttncactactaaatatacagggtatgtcctaacatggagttaactgggaatagcantacacttagcaagtatctgtgaatncttagcactgaccgggtaacaagaaatgctttgggtaatancctacttanttaattgggaggaaggtngtaaaataaacnttaggtaatttgcgnaatacttcaaangggaaaaatttttttgtgnancttttagnacccttttttncctanntttgaaaangggngaantttttgntngacaattaaaaattt

SEQ ID NO: 278 - DNA, 392 bp, Homo sapiens
ttgaggcacaagcaataataaaactgcattttttacgttacaaaaagattttgtatgttatctgcatgatataccaattttctcaatctcttctgcaataacatctcattaacactctggtccacatgttgatttaataaagtcagaatggcaggtgggaggatggtaaaataaacttaccaaggggcaaaaggaaccaaacatttactgagtgccgactatgcaagctctactaggttttacacactttacataaacgtgaacctaagttctagttatcagttaacaggccagcattgctacagccagtaagtctatgttttcaatgttctttcgcttttaagtacaaattgtggaacaaaactatatctttgcccaaagaagcacatcaa

SEQ ID NO: 279 - DNA, 88 bp, Homo sapiens
ctgcaatactcaaggttaaaacattagaaaagcatttgtgtgacaggtatattacagtattatcaaaatattacattttcagacttac

SEQ ID NO: 280 - DNA, 588 bp, Homo sapiens
  misc_feature 504, 509, 529, 543, 555, 562, 575, 582, 584: n = A,T,C or G
ctgtttcataggctggagatgcactcttctagactgctcgagacagccagagacaggggaggagggaagaaggatactgtggaaagggatggcggggcaaacatttagagctagaagccactactgggccaatgctaaagtttctgtctctaagcctaaaaaagccagtgtagtagggcccttatcactcttagtttgctaggtttcccctctgaaataatgagcagatttagccaggctagcagaaaggaagaggacggggctgtgcaggagttagcagaatcttgattcttgctctatggtcggtacttgcacaggaagtgttggcgcttgttgcattcgttgctgctccaagttaaaaagtttgttattggagctcatctcagcacagtgcttgttcccacccatggacttgccagaccaggatctgtcagatacatggcccatcatcccttgcccttgctgctttttttggggtcgtgcaggccaatccatatcggttgnttctntgataccccttatgacctcntctttgggggtggnttcctttacctngccgganccccctaagggcnatttccncnccct

SEQ ID NO: 281 - DNA, 453 bp, Homo sapiens
aaagaaaaaaaatcagtatctagatctctgcacttggcatggaaaattttgaactatttattccttaattttcttttatttcagtttctcatagagctaaatggttttacatatattctcttgtcagatttgtggtctaatagaggtagaaaatggaaattttcccagtacttagaaatatggtacttaggaagaagtctaggatgtgaattacatatacacttcccctagtgactatgataatcaagggggcagatagcagaggaaaataagttaacatgaaatttgacaaattttattactttgccaaaattagcaaaacaaaaatactcaccctcccctgctcaccccccaactttttataaatattcaattcagctacaaaacaaaatactggacccacttctttcagaagagatgaagataccttatatgccctaaagttaataccag

SEQ ID NO: 282 - DNA, 708 bp, Homo sapiens
  misc_feature 560, 567, 604, 632, 638, 647, 651, 663, 674, 675, 689, 694,698: n = A,T,C or G
ctgcccagctttgaggaaatctgaaatagagtactatgctatgttggctaaaactggtgtccatcactacagtggcaataatattgaactgggcacagcatgcggaaaatactacagagtgtgcacactggctatcattgatccaggtgactctgacatcattagaagcatgccagaacagactggtgaaaagtaaaccttttcacctacaaaatttcacccaattgaaacaaacagttctgagaccgttcttccaccactgattaagagtggggtggcaggtattagggataatattcatttagccttctgagctttctgggcagacttggtgaccttgccagctccagcagccttcttgtccactgctttgatgacacccaccgcaactgtctgtctcatatcacgaacagcaaagcgacccaaaggtggatagtctgagaagctctcaacacacatggggcttgccaggaaccatatcaacatgggcagcatcaccagacttcaagaatttagggccatcttccactttttaccagaacggcgatcaatcttttccnttagctnaagcaaacttgcattgcaatggtgaacccgggtgggnaattccaatacaggggcattaccccggngcttantttggcctngganggttcagggatnaataccccctnnggccgggaaccccncttangggngaaatttcaa

SEQ ID NO: 283 - DNA, 227 bp, Homo sapiens
tggatgcccgtcaccaagttgggccgcttggtcaaggacatgaagatcaagtccctggaggagatctatctcttctccctgcccattaaggaatcagagattattgatttcttcctgggggcctctctcaaggatgaggttttgaagattatgccagtgcagaagcagacccgtgccggccagcgcaccaggttcaaggcatttgttgctatcggggactacaatgg

SEQ ID NO: 284 - DNA, 478 bp, Homo sapiens
  misc_feature 476: n = A,T,C or G
ctgggctccacccccatccattgatttaaccaacttcctggtgcgttactcacctgtgaaaaatgaggaagatgttgcagagttgtcaatttctccttcagacaatgcagtggtcttaacaaatctcctgcctggtacagaatatgtagtgagtgtctccagtgtctacgaacaacatgagagcacacctcttagaggaagacagaaaacaggtcttgattccccaactggcattgacttttctgatattactgccaactcttttactgtgcactggattgctcctcgagccaccatcactggctacaggatccgccatcatcccgagcacttcagtgggagacctcgagaagatcgggtgccccactctcggaattccatcaccctcaccaacctcactccaggcacagagtatgtggtcagcatcgttgctcttaatggcagagaggaaagtcccttattgattggacctcggncg

SEQ ID NO: 285 - DNA, 150 bp, Homo sapiens
aaactcttcttgaaacacaattatggcttcctggaattgtttttcactttcccctgtggcgctcaaaagctttgtgttttcatagagagtttcattcacaatgcgatcagacttagatttgaaaacagctcctaggatacctgtcgccac

SEQ ID NO: 286 - DNA, 328 bp, Homo sapiens
ctgacaaagatggtgtggccgatgtgtctattgaagattctgtgatctcactctcaggagaccattgcatcattggccgcacactggtggtccatgaaaaagcagatgacttgggcaaaggtggaaatgaagaaagtacaaagacaggaaacgctggaagtcgtttggcttgtggtgtaattgggatcgcccaataaacattcccttggatgtagtctgaggccccttaactcatctgttatcctgctagctgtagaaatgtatcctgataaacattaaacactgtaatcttaaaagtgtaattgtgtgactttttcagagttgcttt

SEQ ID NO: 287 - DNA, 232 bp, Homo sapiens
ccaattgatttgatggtaagggagggatcgttgacctcgtctgttatgtaaaggatgcgtagggatgggagggcgatgaggactaggatgatggcgggcaggatagttcagacggtttctatttcctgagcgtctgagatgttagtattagttagttttgttgtgagtgttaggaaaagggcatacaggactaggaagcagataaggaaaatgattatgagggcgtgatcat

SEQ ID NO: 288 - DNA, 418 bp, Homo sapiens
cctctcccaggcccatgggacacaggcgagcagcccgttcctactgagagaggagagccaggctgaccagcacatccggtatggccccctgaataccgatgatgccatctcctcagaccaggagagacttcatctcctgtttcccaagtgtgtcatcaatatcatgaccttctcacgcatcctcatgggcttgctccaaggggtttacttccctgccctgaccagcctgctgtcgcagaaggtgcgggagagtgagcgagccttcacctacagcatcgtgggcgccggctcccagtttgggacgctgctgaccggggcggtgggctccctgctcctggaatggtacggctggcagagcatcttctatttctccggcggcctcaccttgctttgggtgtggtacgtatacaggtacctg

SEQ ID NO: 289 - DNA, 663 bp, Homo sapiens
  misc_feature 423, 446, 474, 508, 529, 539, 540, 581, 592, 605, 627, 630,632, 643, 647, 651, 654, 660: n = A,T,C or G
ccaccacacccaattccttgctggtatcatggcagccgccacgtgccaggattaccggctacatcatcaagtatgagaagcctgggtctcctcccagagaagtggtccctcggccccgccctggtgtcacagaggctactattactggcctggaaccgggaaccgaatatacaatttatgtcattgccctgaagaataatcagaagagcgagcccctgattggaaggaaaaagacagttcaaaagacccctttcgtcacccaccctgggtatgacactggaaatggtattcagcttcctggcacttctggtcagcaacccagtgttgggcaacaaatgatctttgaggaacatggttttaggcggaccacaccgcccacaacggccacccccataaggcataggccaagaccatacccgcccnaatgtaggacaagaagctctctntcagacaaccatctcatgggccccattncaggacacttctgagtacatcatttcatgtcatncttgtttggcacttgatgaanaacccttacnnttcaaggtttcttggaactttctccagtgccctcttgacangaccttgcccngggcggccgttcnaagggcgaatttccaccccccnttngngccttactagngggntccnccnctggancaa

SEQ ID NO: 290 - DNA, 206 bp, Homo sapiens
  misc_feature 62, 64, 146, 194: n = A,T,C or G
ccaaggtgcttctgcatctggaggagaagacctgtgtggtgggatttgcagggctgcgccananagccctggtggccgtcacggtcacagacccggccccggtggccgactatctgacctcacagttctatgccctcaactacagnctccggcagcgcatggacatcctggatgtgctgactctggctgcccangagctgtctagg

SEQ ID NO: 291 - DNA, 360 bp, Homo sapiens
ctgcaatgaaggcgtggagctcaggagaagcagccactgacaatgcccctcctgccgcagggtcttctgtgcagcctcccatggatcaatataccagttagttaaaacacacatcagtattttctgtcctttagcaacgatgatgatatttgccaccagcgagtgtgatccgtgaggcaattttggaaactgacttggtgcttgccactatcttcaggcttacagccctcagacgaggcaaagggaggcaaatcgatttgagaccactgattagcaataacgtatttagcattttgctctggttttggcagataagggtaagttaattatcaacatcatactttccaaagaaagaatttt

SEQ ID NO: 292 - DNA, 174 bp, Homo sapiens
ctttcaacttaaatcactgaggcatttttactactattctgttaaaatcaggattttagtgcttgccaccaccagatgagaagttaagcagcctttctgtggagagtgagaataattgtgtacaaagtagagaagtatccaattatgtgacaacctttgtgtaataaaaatttg

SEQ ID NO: 293 - DNA, 406 bp, Homo sapiens
cctaagttattgtttgcataaaaagaatcatgttccctgtgtacatttaagaaaaaaacaaaaaaacggaaatgtcagaattgtatggaaataaaacttgtttgaaaatttggaatagtgctgctgccagcttatttttctggtacttgtattttcacatgttaaatgatctttatatatgttgaattaacaaatattttgagtttctgagaaaaaacaaaacatattaatggtattgaaatgtgttagtagtctggctgtgtgcccaaaattctgtttcgcagcaaaagtgaagacctgtatgtaaagaaagtataacaattatttctttgtattttaggggctttaaccggaacatcgtctagctggtgttaggaatgtttgcttaatttccagactttttttt

SEQ ID NO: 294 - DNA, 304 bp, Homo sapiens
ctggctcagccgacaggtttgtttatgtgtgggataccacaagcaggagaatattgtataagctgcccggccatgctggctccatcaatgaagtggctttccaccctgatgagcccatcattatctcagcatcgagtgacaagagactgtatatgggagagattcagtgaagatatggactggaagactccaaggccgcttgtctttgagacctcagactgcataagtgatgccaaatgttggatgtccaggctagcaccctcccttcagatgaccattgctagcaagaaacaggaggcggtgg

SEQ ID NO: 295 - DNA, 349 bp, Homo sapiens
ctgtgggagaaggctagggttggaggtacacctggagatgtgtcagtttggtgttggcactgcagattcagcgcccgtggtccctgactaaggcactctgcctagatctattttcccctgactgtaccttttatgccccctggctttcccattctccctggaaactcctgtttgtttttgctttctaagatagagatagcaagtagggttcatttctctcatctgactgttgggttcatctgactgttgagtggcggctctttggaattgtaatttgagaaggattgtgaagaaatcagtgggcttaataggaaatagtgctgtgattgattagcaatgtctgccatgg

SEQ ID NO: 296 - DNA, 208 bp, Homo sapiens
gtggtgcagtgggtgagctttgctgattccgatatagtgcccccagccagtacctgggtgttccccaccttgggcatcatgcaccacaacaaacaggccactgagaatgcaaaggaggaagtgaggcgaattctggggctgctggatgcttacttgaagacgaggacttttctggtgggcgaacgagtgacattggctgacatcacag

SEQ ID NO: 297 - DNA, 218 bp, Homo sapiens
ccatcaccgacctgaaggcggaaattcacgggggcagtctcattaatctgacttggacagctcctggggatgattatgaccatggaacagctcacaagtatatcattcgaataagtacaagtattcttgatctcagagacaagttcaatgaatctcttcaagtgaatactaccgctctcatcccaaaggaagccaactctgaggaagtctttttgttt

SEQ ID NO: 298 - DNA, 545 bp, Homo sapiens
  misc_feature 18, 65, 412, 497, 499, 530: n = A,T,C or G
ctgagcgtattttccttngcctaccgatgggttctgagatgcgcacgagggaggaaattgcttantccaccatcaagagcctctgcactgtgtagctaacatgggatcgtcacacggaggtgggaggaaatcgattccattctgcctatttgcaaacttctgcccgattggcactgctcctctcacatcaatgcacttctcctgatgctcatgaccagccttcggccatactctctgtagtccacgggcttcacgtccatcacagtggccttaattcgagactcgtcgttgtaggtctccactttgaccctgactctgaatatgaaagatcggaagttggcattctggaaaacttcttcaaatgcctgttcattcttgtcttttaattccccaagataagcagcattttgtncaaggatagcttcagcggactcctggaaacaagtcacccactgattctcttgaaaatctgcaatatttactgacaggatcatgcngnacttgaaattgggaaattcggggcgcacttntacagcgggcaatcc

SEQ ID NO: 299 - DNA, 410 bp, Homo sapiens
  misc_feature 120, 146, 151, 153, 176, 216, 228, 255, 285, 336, 338, 386,396, 403: n = A,T,C or G
gtggcagggctgcccctgcataaggtgataaaactctgcttgatatatggaaggccaggcagggggtgggaagagagggagggagagaaacagaagggaaaggttggggtgagagaacanagtgaaatatggggagaaataaaganaagcnanagactggaaaaaagatggagacnagagagggaaaaaggagaaaatcagatttaagaagatcanaaaaagaagacngaataaaagagaaagcatgtacctganaaaggcttggagggaaactctaaaatcagngtcacttccaaaaaaacttacacactgggtgagacaagcctaacccaccanangacctgccccggcggccgctccgaaagggcgaaattccagcacactgngcggccgttnctaatcnggattca

SEQ ID NO: 300 - DNA, 545 bp, Homo sapiens
  misc_feature 246, 298, 362, 375, 411, 428, 445, 452, 456, 459, 474, 488,499, 507, 517, 529, 532, 545: n = A,T,C or G
ctggagcccacttccttggcagcggcagcaattcagagggtgagtgtacgcgcacacacctggaaggaactcacactcactgcaagggtgatctctgcaaagaatggctgtgagggagcctgggttttgctctacacagaaggcaggtccacaggactcggggggtgatacagatgaagcaatcacacaatctgtagggtctgggatgcaggatacagtggaggtagaaggagcagaggactgtangctttggaatggggttgggaggggttgggaggtagagccatgccagcacttnaccgtgtgccactcctgttgcagacgccctgcccccttaaaacagaggccggggcccctgggtntaacagaagcagntcttcaggtagagatgccacacttggcatcaagatncttgatttctgtggggncaacaccatcaaagcangggtcangaantgnctccttggctggagncaaatgaggtaggncaacccatttnccccttgnccttcccatnttacaagctggnggnttgggggtggacn

SEQ ID NO: 301 - DNA, 393 bp, Homo sapiens
  misc_feature 220, 320, 347, 363, 380: n = A,T,C or G
ccactggctgagttattggcctggcaggtatagagtccgctgttcttctcagtgatgttggagataaagagctcttgtgtgtgttgctggatgttcccatcaatcagccaagaatactgtgcaggtgggttaagaggctgcatggcaggagaggctgaggttcacccctggacggtaataggtgtatgacggggaaatggtggggtcgtctgggccatanaggacattcaggatgactgggtcgctgtggtcaacacttaattcgttctggattccacactcatagggttctacatcattccttgtgacactgagtagantgagggtcctgtttcattggacagacncttcgccgcgaccacngctaagggcgaattccngtaacactggcgg

SEQ ID NO: 302 - DNA, 177 bp, Homo sapiens
  misc_feature 116: n = A,T,C or G
ccaacacctgcctaaggcaaagtttcttattacataaatatccttgttaaaaagcaaaatattgatcctgtacaatataacctgttaaaaaaatcgtgcttacaaacagctcctanataagagggcaggtggagagaggacggagaaaacagctaccaaaaagggaggggggagttt

SEQ ID NO: 303 - DNA, 413 bp, Homo sapiens
ctgtccaatggcaacaggaccctcactctattcaatgtcacaagaaatgacgcaagagcctatgtgtgtggaatccagaactcagtgagtgcaaaccgcagtgacccagtcaccctggatgtcctctatgggccggacacccccatcatttcccccccagactcgtcttacctttcgggagcgaacctcaacctctcctgccactcggcctctaacccatccccgcagtattcttggcgtatcaatgggataccgcagcatcacacacaagttctctttatcgccaaaatcacgccaaataataacgggacctatgcctgttttgtctctaacttggctactggccgcaataattccatagtcaagagcatcacagtctctgcatctggaacttctcctggtctctcagacct

SEQ ID NO: 304 - DNA, 500 bp, Homo sapiens
  misc_feature 462, 479: n = A,T,C or G
ctgaacttgtagaaataaaaaagattatgaaggcatattatgaataattttatgtcaataaattatcaatgaagtggacaaattcctaggaagacacaaactaccaaaaccaactcagaagtagaaaacttgaataaacctatatcaagtaaataggttaaatgagtttttgaaaagatacccacaaagaagagcccaggctgaaatagcttcttaaatgaattctacaaaacttttaatgaaaaattaatacaaattcttcacaaactttttcaaaaagtagaagagtggtgaacacttctgacacatactacaacatggaagaactcagaatatgctcagtgcaagaagccagtcacaaaagactacatattatatgatactatttatatgaagtgtccagaattggcaaatatatagagatagaaagtggattagtggttgcttagggctagcacaganttggggggaatgggaanggctgggggtaacagacctcg

SEQ ID NO: 305 - DNA, 434 bp, Homo sapiens
ccaaaagaagtaagacagcttgctgaagatttcctgaaagactatattcatataaacattggtgcacttgaactgagtgcaaaccacaacattcttcagattgtggatgtgtgtcatgacgtagaaaaggatgaaaaacttattcgtctaatggaagagatcatgagtgagaaggagaataaaaccattgtttttgtggaaaccaaaagaagatgtgatgagcttaccagaaaaatgaggagagatgggtggcctgccatgggtatccatggtgacaagagtcaacaagagcgtgactgggttctaaatgaattcaaacatggaaaagctcctattctgattgctacagatgtggcctccagagggctaggttagtacaaactcgcattcatggcttggtttcccagaagatctccatttaacttttttacctc

SEQ ID NO: 306 - DNA, 146 bp, Homo sapiens
ccatgatggactggatggtgttgctgtagacaaccgcccggtactgccggcattcctcctcggagtagccatcctcgtggatgatcttcatctgcttgacgatggtgctcttccctgactccccagcacccaacagcagcaacttc

SEQ ID NO: 307 - DNA, 548 bp, Homo sapiens
  misc_feature 405, 443, 520, 529, 535: n = A,T,C or G
cctctctggtatctctgttctttggcagagcctaacaaagtgttcgtaggagaggccagaggattttgactttctatctcgtagtcctttgagagaaacactaaagcaccttgactactggtgtctgctttctgcaggtcacctatatgactgggttccaaggataaggctccactctcactagtagtcccagattttagaatgctacccagaacttgaggactagtccgtttctccagctcgtaagccttgggaaacacaggatgctcagttcctgagggaattatttcagcaccctgtgaaaccaaagtagcaggatattctccttgaaatgtcacctccatcactttatgctctgatgacttcccagtaacagtctcagggccagcactgggctcatttatnaatgataaaccccactgattctggaagatatcccccangttttgctgatctgtctgagagggcagatccactttgtgctgtgctcaacagcatagtttgcatatttgaaggatanaataaaaangctagncttaatttgttca

SEQ ID NO: 308 - DNA, 353 bp, Homo sapiens
  misc_feature 345: n = A,T,C or G
ccacgctggtctcaaactcctgacctcgtgatctgcccgcctcggcctcccaaagtgctgggattaccggcgtgagccaccgtgcccagccccacttgaactttaatccttgcctcggaattggcttctggggaaaccaaaaatatattaaaaaaggagagaccaggaccttaaaaagagcccaagttgttgagctccctgccaagtcacccccaggtatctctgcccaccagcttgcatgagccagatcctcagtgcaggtttttccaatcagtcatttgttcttccacccaacgctcaagatttgcttcttcaagacaactctctgatcagacctcgggccgngaaccacg

SEQ ID NO: 309 - DNA, 590 bp, Homo sapiens
  misc_feature 42, 46, 90, 118, 142, 153, 159, 178, 189, 207, 209, 224,230, 303, 311, 360, 459, 487, 494, 525, 542, 543, 546, 563,566, 569, 575, 578, 584: n = A,T,C or G
caagttggaaaatttggttaaattacccggaactttccaacnttanttagggggggcgggaaaatttttgggggggccccccttctttanaaattggcccatttggccttccgaaaancccggggccccgccccccaaattnggtggaaaatngggaanttttttttttttggcccanaaaaaaatttnccccgccccccttttttncnaaaagacccgggggngcccgnccccccgggggggccaaagggggttcccttgcggttcgtaaccgccacgtccgatacaacctgcccttggcanttgggttnggggtcacactgtgtgttccttttcccaatgaaaaggggcctttgttangaacccagcaagttattctgaagaaagaaaaattgtggttaagggaatggtactgaggcattgactctggagaagcccttgctggatctagtctttctnatgcacatcaagaatctaagggaacctngtgaaanggctcctcggactaaacaacaattcattganaatgacacatttgtttnncanaagacttgccgaacccntanggnaaatcnacncattgnggcggt

SEQ ID NO: 310 - DNA, 318 bp, Homo sapiens
  misc_feature 76, 81, 148, 209, 220, 227, 243, 256, 258, 264, 276, 280,286, 298: n = A,T,C or G
tgagtatgagaagatgtcaaggactggacgtattttgttgcctaaaaaaaaaaggctgtttgtaggcgttttaaanaaaanatggggccttactacgttgcccaaactggtctcgaacttttggcctcaaacaatcctcctgtttcantctaccaaactgctgggattacaggcatgagccccctgccctgtaattttatttaccctcngcccgggaccnccctaanggcgaattccagcccnctgggcggggggntnctattnggatcccatttngggncccaancttggggtaatnatgggcataactgtttcctg

SEQ ID NO: 311 - DNA, 326 bp, Homo sapiens
  misc_feature 111, 188, 204, 266, 288, 299, 309, 312, 320: n = A,T,C or G
ccaattgatttgatggtaagggagggatcgttgacctcgtctgttatgtaaaggatgcgtagggatgggagggcgatgaggactaggatgatggcgggcaggatagttcanacggtttctatttcctgagcgtctgagatgttagtattagttagttttgttgtgagtgttaggaaaagggcatacangactaggaagcacatnaaggaaaatgattgttaagggcgacctgcccggggcgggccgctcgaaagggcgaatttcancacacttggcgggcggtactantgggattccancctcggaccnaanttttggcngtgata

SEQ ID NO: 312 - DNA, 225 bp, Homo sapiens
tagagaaattaatttaatattagaatttctattatgaatcatgtgaaagcatgacattcgttcacaatagcactattttaaataaattataagctttaaggtacgaagtatttaatagatctaatcaaatatgttgattcatggctataataaagcaggagcaattataaaatcttcaatcaattgaacttttacaaaaccacttgagaatttcatgagcacttt

SEQ ID NO: 313 - DNA, 248 bp, Homo sapiens
  misc_feature 19, 22, 24: n = A,T,C or G
ctgggctggacatatttgnccnantttctgcctacatcaagaattcaaacccagcactcaatgacaatctggagaagggactcctgaaagccctgaaggttttagacaattacttaacatcccccctcccagaagaagtggatgaaaccagtgctgaagatgaaggtgtctctcagaggaagtttttggatggcaacgagctcaccctggctgactgcaacctgttgccaaagttacacatagtacag

SEQ ID NO: 314 - DNA, 345 bp, Homo sapiens
ctggtgatcaagtctgggaacagccgtaacaggtcaaccttgtggagccatcgcgagttagagggtgaaagatggcagaaaaaaaagtcttgtgtgtgagtgtgttttttgagtttgcatcaatcttaatgtctcttcataatacttttataatacattaagcctcttgtctacatatttggagagaatatgactttactagcagagaaatacaatatatcttgtctactggactgtaaaatatatgtatgaaataaaattagttccatttggtcttctagtatattaaagtgctatctgacgttgttatcctgtttttacaaaaaaaaaaaaaaaaaaaaaaac

SEQ ID NO: 315 - DNA, 413 bp, Homo sapiens
  misc_feature 382: n = A,T,C or G
gggagaagctgctgaggcatcactatgagcaacagcaggaagacctagcccggaatctaggcaagggcaagcgggttcgcaagcaagttaactacaatgatgctgctcaggaagaccaagacaaccagtcagagtactcggtgggttcagaggaggaggatgaagacttcgatgaacgtcctgaagggcgtagacagtcaaagaggcagctccggaatgagaaagataagccactgcctccactgctggcccgagtcgggggcaacattgaggtgctgggcttcaacacccgtcagcggaaggctttcctcaatgctgtgatgcgctgggggatgccaccacaggatgccttcaccacacagtggctggtgcgggacctgangggcaagactgagaaggagtttaaggacctc

SEQ ID NO: 316 - DNA, 88 bp, Homo sapiens
  misc_feature 55, 63, 66, 76, 78: n = A,T,C or G
ggttattggagggctgggagtggtggttgttggagggctgggagtggtggttggnggaggggnggntgcggcggtngntcagcaaacc

SEQ ID NO: 317 - DNA, 147 bp, Homo sapiens
gccaacatgattactaaaagccaagataaaaccaaaagcaaacttgctaaaaaatcctgaattccatgaggttaactctgaaatcctccaaacaaaatgctagaattgtccactagtgttaagacgagaaaactgaggaaaactcag

SEQ ID NO: 318 - DNA, 299 bp, Homo sapiens
cctctctgcagactccacgggggctcaccctctgccgtcaggcgactctgaaattccgacatttctcccttaaagtctcaacagacacaagagaagtttccatcaagcaagcactgacatatttatattaaaaaatagtgcaaaatctcaacatttatataaataactctaaacccctgctttgtaatttttttctttacaaggtaatacacactttctgacttggcactcaaaaattgccatttttttcctcttctagttcagaaaacaactttttttttttaataggacctcggccg

SEQ ID NO: 319 - DNA, 100 bp, Homo sapiens
  misc_feature 18, 19: n = A,T,C or G
ttgaacacgtttaccagnnagcaatttaatcttcttctcaccatcttcagcaaaatcttccaatacctctttaacatttttctctaatcgcctaacttca

SEQ ID NO: 320 - DNA, 325 bp, Homo sapiens
  misc_feature 220: n = A,T,C or G
caccactgcactccagtgggcaacaaagcaagaccctttgggaggctgaggcgggtggatcacttgagctcaggagtcaggagttcaagaccagcctgggcaacatagggtagaccctgtctctacagaaatacaaaaattagctgggcttggtggtggcatgtgcctgtagtcctagctactcgagaggctgaccgttggaggatcactttgagcccangaggtggaggctgcagtgagcaagtcatcactgtactccagcctggtgacagagcgagaccctatcaccgccccccgccccaccaaaaaaaaactgagtagacag

SEQ ID NO: 321 - DNA, 80 bp, Homo sapiens
cctactcaggtaaaaaatcagtgcgagcttagcgctgtgatgagtgtgcctgcaaagatggtagagtagatgacgggttg

SEQ ID NO: 322 - DNA, 86 bp, Homo sapiens
ctgatgcagggggcgggagggttcgtgacagaatagggccagcagtacacgctcacatttccgctggttggctggtgagagcttgg

SEQ ID NO: 323 - DNA, 244 bp, Homo sapiens
  misc_feature 18, 19: n = A,T,C or G
ctgcctccctgacacttnnttactacatttgtaccagtaatacctgctgaacatcttactgcttgtattcttccattggataagtagaatttctcatcattattgtactcgtcaaatactccccatcgtagatgagcccactcatggacaaatgccctaccttgtggtccatattcagctaacttttttcctgcaatgagatcaggagtgaggtggatcctttcacccttctctccacagacct

SEQ ID NO: 324 - DNA, 344 bp, Homo sapiens
  misc_feature 19, 178, 190, 302, 314: n = A,T,C or G
gaacctctcctgccacgcnggctctaacccacctgcacagtactcttggtttgtcaatgggactttccagcaatccacccaagagctctttatccccaacatcactgtgaataatagtggatcctatacgtgccaagcccataactcagacactggcctcaataggaccacagtcacnacgatcacagtntatgagccacccaaacccttcatcaccagcaacaactccaaccccgtggaggatgaggatgctgtagccttaacctgtgaacctgagattcagaacacaatctacctgtggngggtaaataatnagagcctcccggtcagtcccagggttgcag

SEQ ID NO: 325 - DNA, 255 bp, Homo sapiens
  misc_feature 19: n = A,T,C or G
ctgcaccacctcgcagtgnaggagcaccattagcaccggctggtcctggaggaccccgggctcccatcagtccaggagctccaggaatgccagcgggacccatttcgcctttaccaccaggactaccattaatcccaggagggccaggaggaccttgagcaccagcgtgtccctgaggtccaggttctcctctttgtccaggggcaccatttgaaccaggagaccctgcaggtccaacttcacccttagcaccag

SEQ ID NO: 326 - DNA, 335 bp, Homo sapiens
  misc_feature 118, 123, 128, 198, 200, 233, 247, 255, 259, 280, 290, 301,309, 310, 318: n = A,T,C or G
aaactaattgtattctgaggtaaccacaaaataaattcaaccaaactggggtccaccaagtgggggaaggggaagggagagaataatcttgggggttttttttttggcaatttttttntttgnatagngcttttttgttttgtttttgttctgcattaaggccttttttgctttgacttgaaataagttctttgacanancatattgcttggttaattaagtaacctaaagtntgcattaggattgngaaatgtntcgngagtatgccaatcctgagggnggaaccaaanaccctttgatnaaaagggnnggggatcntggaggctttactttaa

SEQ ID NO: 327 - DNA, 295 bp, Homo sapiens
ctgcgagggactgggactctgcagagacggggtctgaatggagggggctgctgactgtggtgcctggccttggatgcctgcaggggtcaggacatctgctcactcactcttggtaggtactgtgctaagagagaaaatatatatctaatacaaaaaagtagccaggcatgatggtggcacacgcctgtagtcccagctactcaggaggctgaggcacaagaatcgcctgaatccaggaggtggaggttgcagtgagccgagatcgcaccactgcactccagcctgggtgacacag

SEQ ID NO: 328 - DNA, 417 bp, Homo sapiens
  misc_feature 9, 12, 33, 42, 57, 104: n = A,T,C or G
ctccagctnggnaccgagctcggatccactagnaacggccgncagtgtgctggaatncgcccttcgagcggccgcccgggcaggtctgcagcatgcccacctgnattccctgtccccttccttcatgaaggcatctccaggcaaggaaaactgaagtcattggcccgatacaaaacatttcctgcaacgaaggaggtggtgccgacgtgctgcttcccatcaccagaactgttgagtagaggctgggttttgcagtaagagggggtcctgagagagatgctatgtgacctggttggggaggggatccctctagtttggagatacttttactctaatccctgttgtcagtgacatttccgtttataacagccaatgattacctaaaattgcttttcccttaataaaaaataacatttt

SEQ ID NO: 329 - DNA, 483 bp, Homo sapiens
  misc_feature 281, 417, 457, 472: n = A,T,C or G
ccagcaggcgcatgaaggcaagttgggtagccatttccttggaagtcactccttctacattatattcaaactggctgccagcattgatagtttctcctagccagacgtgtttcttgtccttggagctcctataccagttcttggctgggatgttttcaggttgggcccggatacaggtttcgccagtagagaaatcacagtatactttgatagcatccatagtgcatccttggttagggtcaatccagtagtaaccactgctccactctgggtggctgagnctcaagtcacggcatgtgcgagctgggttctttctagagccttcaggagtaagaagggtctcaatctggttgttgagagacttcagagtagcatcaacttcatagtccttgggtctgagagaaggtgctgagcgangctggtcagccctgtagaagtctccatcgtaaccaaagtnataaccaccacccgnttacacacctc

SEQ ID NO: 330 - DNA, 358 bp, Homo sapiens
  misc_feature 183, 315: n = A,T,C or G
aaaatattaagaatggatgaaattttaatattcagaataatctgttcaaacctgagtgtattaagactaagtgtacttgacaattgaatgaattaagcctaaaaacatttctctaagaaaccagtggtccatttaaccatttgatgaaacattattttaatgacttataaaggatagtacagnatactgaaattccacttaaatactgaaatattctactaaatgacattgttttgtctaaatttcctccagaaaaatctgttagcatttcttaaaagtccctcagatttgagggaaattctaaattaggacagntttctctccaaataaatataaatgatcttgagtatttttgttt

SEQ ID NO: 331 - DNA, 306 bp, Homo sapiens
  misc_feature 18: n = A,T,C or G
ccacttggggcttaggcngaaatagagccatggtactgaccaaagggaccatagcacatggaataaaactcaaaacaggacttcatgttttatggaaattatatttaaccacttcaacattgtaaatctggataacttttaatatctaaactatataagaaagtaaaatttaacatgttaatatggataatttttttatttttgtaccttgatgacttaaatgtaagcaacaaagtggttaaacacatacccatctaaatttttttatagccttccatgttaaactataagtaaataattagtttt

SEQ ID NO: 332 - DNA, 251 bp, Homo sapiens
  misc_feature 21, 185, 186, 214, 219, 221, 236, 239, 242: n = A,T,C or G
ctgaaggtgggcatcaagggnagcatcactgatttggtcacaaatcttatctgggtggccttccccgaccgactctgaggtgaaaaggaatgtgccctcctcgatgaacgcctcgtggaagccgttgagctgtccgttcatgttggtgtcggtgtgcggaagtggccttacgaaggaccaacggnnaggcggcactgctgctaaatgctgcaanctgcngnacagcgttctactcntancanggcgggctg

SEQ ID NO: 333 - DNA, 579 bp, Homo sapiens
  misc_feature 493, 531, 542: n = A,T,C or G
ctgaaaaccagcctgccaatcagaatgctgctcctcaagtggttgttaatcctggagccaatcaaaatttgcggatgaatgcacaaggtggccctattgtggaagaagatgatgaaataaatcgagattggttggattggacctattcagcagctacattttctgtttttctcagtatcctctacttctactcctccctgagcagattcctcatggtcatgggggccaccgttgttatgtacctgcatcacgttgggtggtttccatttagaccgaggccggttcagaacttcccaaatgatggtcctcctcctgacgttgtaaatcaggaccccaacaataacttacaggaaggcactgatcctgaaactgaagaccccaaccacctccctccagacagggatgtactagatggcgagcagaccagcccctcctttatgagcacagcatggcttgtcttcaagactttctttgcctctcttcttccagaagncccccagccatcgcaaactgatggggtttgtgctgtancctgtttggangctttgacaggaatggactggatcacctgactccacg

SEQ ID NO: 334 - DNA, 534 bp, Homo sapiens
  misc_feature 394: n = A,T,C or G
ccatgttcaactttacaaaatttcttggaaaactggcagtattttgaactgcatcttctttggtaccggaacctgcagaaacagtgtgagaaattaagtcctggttcactgcgcagtagcaaagatggtcaaggccatggaaaaagcagaaatttaccaagaaagctgatacccatgtatagttcccactcatctcaaatacatctgctatctttttaagctaagtcctagacatatcggggataacatgggggttgattagtgaccacagttatcagaagcagagaaatgtaattccatattttatttgaaacttattccatattttaattggatattgagtgattgggttatcaaacacccacaaactttaattttgttaaatttatatggntttgaaatagaaagtataagttgctaccattttttgataacattgaaagatagtattttaccatctttaatcatcttggaaaatacaagtcctgtgaacaaccactctttcacctaccagcatgagggcaaaagtaaagg

SEQ ID NO: 335 - DNA, 282 bp, Homo sapiens
  misc_feature 21, 256: n = A,T,C or G
ctgcgtgaagatccacaaccngctcatctcgtccgtctccaacatcacctgccccaactttgatgccagcatttgcatcccgggctccatcacattcatgcccaatggatgctgcaagacctgcacccctcgcaatgagaccagggtgccctgctccaccgtccccgtcaccacggaggtttcgtacgccggctgcaccaagaccgtcctcatgaatcattgctccgggtcctgcgggacatttgtcatgtactcngccaaggcccaggccctggaccacag

SEQ ID NO: 336 - DNA, 193 bp, Homo sapiens
  misc_feature 19: n = A,T,C or G
aaaaatctgattaaaaaanaaacgggcagggaaaatactaggcagtataggttttgaattttctgaagggttaactctgctgcaggcagtcccactcggccccagctctccagaggtgggtggtggtctgggggcagtgccctctggccccttcctagcaccaaaagggaggaattggggagctctttaacag

SEQ ID NO: 337 - DNA, 341 bp, Homo sapiens
  misc_feature 169: n = A,T,C or G
aaaatagcatgtttgaaaccatcagtttgtgtctaaaattagctgtagcacatggatgttgtccatattaagctatttgctgtttgaattatagaggtctacagtatttgtgttggcatagtttttgtaaaaaaaagattaaaaaatatcaggatggtggaaaaactanatctgtgtatctctgttttggcatgcatttattcagtatcttctagcaatggtttttctctgttgatctaccgtagtatcctatttttaagtttatttcatttttaaggagtattgtcatcacttttcaaggtgtcttgacttctacacaaagtatatatattcaggacttt

SEQ ID NO: 338 - DNA, 239 bp, Homo sapiens
  misc_feature 16: n = A,T,C or G
ccatccccttatgagngggcgcagtgattataggctttcgctctaagattaaaaatgccctagcccacttcttaccacaaggcacacctacaccccttatccccatactagttattatcgaaaccatcagcctactcattcaaccaatagccctggccgtacgcctaaccgctaacattactgcaggccacctactcatgcacctaattggaagcgccaccctagcaatatcaaccatt

SEQ ID NO: 339 - DNA, 222 bp, Homo sapiens
cctctttttaccagctccgaggtgattttcatattgaattgcaaattcgaagaagcagcttcaaatctgccggggcttctcccgccttttttcccggcggcgggagaagtagattgaagccagttgattagggtgcttagctgttaactaagtgtttgtgggtttaagtcccattggtctagtaagggcttagcttaattaaagtggctgatttgcgttcag

SEQ ID NO: 340 - DNA, 314 bp, Homo sapiens
ctcagctctcggcgcacgggccagcttccttcaaaatgtctactgttcacgaaatcctgtgcaagctcagcttggagggtgatcactctacacccccaagtgcatatgggtctgtcaaagcctatactaactttgatgctgagcgggatgctttgaacattgaaacagccatcaagaccaaaggtgtgggatgaggtcaccattgtcaacattttgaccaaccgcagcaatgcacagagacaggatattgccttcgcctaccagagaaggaccaaaaaggaacttgcatcagcactgaagtcagccttatctgg

SEQ ID NO: 341 - DNA, 289 bp, Homo sapiens
  misc_feature 18, 264: n = A,T,C or G
cctccacccccaccctgntctagtgctagtttctctgcctggctgtgtcctgtggagctccctctgccacgcctgccaggattggggcttcccttacttcgtcagtcctccttctcagctcctctttgtttttttccaaggcccggaaacaaaactcatgctgtgccatcatgtgatgcagcctgccagaggcccaatgctggaatggcaccatcattcacatcagaactgcagcccctggaaaagaagagacagccatagacnaggagccagagtgggggcagactgg

SEQ ID NO: 342 - DNA, 356 bp, Homo sapiens
  misc_feature 18: n = A,T,C or G
ccagtgtcatatttgggnttaaaatttcaagaagggcacttcaaatggctttgcatttgcatgtttcagtgctagagcgtaggaatagaccctggcgtccactgtgagatgttcttcagctaccagagcatcaagtctctgcagcaggtcattcttgggtaaagaaatgacttccacaaactctccatcccctggctttggcttcggccttgcgttttcggcatcatctccgttaatggtgactgtcacgatgtgtatagtacagtttgacaagcctgggtccatacagaccgctggagaacattcggcaatgtcccctttgtagccagtttcttcttcaagctcccggagagcag

SEQ ID NO: 343 - DNA, 472 bp, Homo sapiens
  misc_feature 16, 219, 260, 335, 357, 362, 363, 368, 375, 382, 390, 398,425, 441, 445, 465: n = A,T,C or G
ctgggtacccacctcnggcctcccatgtgagcctgtccttatgtatagtgtccaacctctgattctagcagtcaagtgccttccccaatcctaatgtcccctgatatgtctctagcgacttgaccatctcttgttccttgggactggggccagcctcttgtctgcccacttccctctcattagtcagatagccccaaaggctctatctttagctcccanagaactttttggtcctcagtatttcccttcccctttccttnctattccccacaactgggggagggaagggagaacaggggcacctgatcatcaatctcccctgcccctctcttganggcccctagattttggatgaanagcannccaantgagcanggcaaanccttgctngtgagcanaatgaccttggaggatcctttgctcanaactgggaactccggnccgngaaccacacttaaggggcgnaatttct

SEQ ID NO: 344 - DNA, 446 bp, Homo sapiens
  misc_feature 17, 272, 370, 407, 435: n = A,T,C or G
aaattacctaagtcccngaaatagaagagtaatttatttttagtattaaagagattaacaagttgtctcattattctgatttacccatattcaaaactcacctactcagaaaactgcaaacccatagttgctaacaatcctatttaaccactaagaaaggatttacaacaataaaagctatgtacataggaaatatcaggagagtagaaagtgctaaccagaggtacccagaaaagctttctgtgactgaaacaatacttcctgtctaaggntcagaagtaagatgcttctttgggggctgagaaattaacatgagaaacctttggtatccaaattggatttctgagctctttgccacggcatttttggntagtctaaaacaatcatttggagaaagcaacaccaangatgaggaggaaggaattctcaacctcngacctcggcgc

SEQ ID NO: 345 - DNA, 197 bp, Homo sapiens
  misc_feature 27, 87, 149, 159, 170, 190: n = A,T,C or G
ggccggggccgcgagctgggaccacancaccctcaagcatacggcgctgttcctgccactgtcctgaagatgtgaatgggtggtacnatttcaacactggttaatttcacactccatctccccgctttgtaaatacccatcgggaaganactttttttncatggtgaagnagcaataaactctggatgtntgtgccg

SEQ ID NO: 346 - DNA, 499 bp, Homo sapiens
  misc_feature 77, 207, 215, 235, 269, 289, 318, 327, 333, 364, 368, 392,405, 411, 423, 426, 429, 434, 455, 456, 458, 480, 482, 488: n = A,T,C or G
ctgtagtcccacttactcgggaggctgaggcaggagaatcgcttgaacccgggaggtggaggttgcagtgagcccanatcgcaccactgcactccagtctggcaacagagcaagactccatctcaaaaagaaaagaaaagaagactctgacctgtctcttgaatacaagtttctgataccacttgcactgtctgagaatttccaaanctttaatngaactaactgacagcttcantgaaactgtccaccaagatcaaccagagaaaatnattaatttcatgggactaantgaactaatgaggataatattttctaatnttttatttnaaattnttgctgattctttacctgcccgggcggccgntaanggccaattctcaaattccatcacnactggcggcccgnttcgancatccatcttanacnggnccaanttctggcccttattagggagnncnggattacgaatttcactgggtncnatgctntgtttttacca

SEQ ID NO: 347 - DNA, 539 bp, Homo sapiens
  misc_feature 20, 77, 80, 102, 163, 415, 425, 501, 517, 538: n = A,T,C or G
cccagccatgtggaactatnagtcccttaaacctcttttctttataaattgcccagtctcgaatatgtctttattancancatgagaacagactaatacaanggctaattttttttgtttgtttgtttcttttgatagggtctcgctctgtcatccaggctanagtgcagtgatgcaatcatagctcactgcaggctcaaacttggggactcaagtgatattcccactttagcctcccaagtagctgggactataagcatgtaccactatacttggctaatttttttctcaaactcctggcctcaagtgattgtccttccttggcctcctaaagtgttgccatggctaacatgtctttaagattccaacagttagcctcgcacggtggcttatgcctgtaatcccagcactttangaggctgagnggggcagattacctgagtcaggagttagaaaccaagcctggacctcggccgcgaccaccttaagggcgaattccancacacttggcggccgntctagtggatcccaactcggnc

SEQ ID NO: 348 - DNA, 69 bp, Homo sapiens
ccaggccggtctcgaactccagacctcatgatccacccgccttggcctcccaaagtgctgggattacag

SEQ ID NO: 349 - DNA, 283 bp, Homo sapiens
  misc_feature 225: n = A,T,C or G
accagacagtcacagcagccttgacaaaacgttcctggaactcaagctcttctccacagaggaggacagagcagacagcagagaccatggagtctccctcggcccctccccacagatggtgcatcccctggcagaggctcctgctcacagcctcacttctaaccttctggaacccgcccaccactgccaagctcactattgaatccacgccattcaatgtcgcanaggggaaggaggtgcttctacttgtccacaatctgccccagcatctttttggctacag

SEQ ID NO: 350 - DNA, 327 bp, Homo sapiens
ccaccgggatagccgggggtctggcaggaatgggaggcatccagaacgagaaggagaccatgcaaagcctgaacgaccgcctggcctcttacctggacagagtgaggagcctggagaccgagaaccggaggctggagagcaaaatccgggagcacttggagaagaagggaccccaggtcagagactggagccattacttcaagatcatcgaggacctgagggctcagatcttcgcaaatactgtggacaatgcccgcatcgttctgcagattgacaatgcccgtcttgctgctgatgactttagagtcaagtatgagacagagctgg

SEQ ID NO: 351 - DNA, 258 bp, Homo sapiens
  misc_feature 229: n = A,T,C or G
ctgacaaggctgggcaaactaagttttcctgagcccattttcctttgagccctgacctagcctggccttacctcattaaggtttggttaaagcagtggaaaggaggaggaggcaggggtggatgggggtgtggggaggggatgagcactctgcagccgattaatctgttggtaggggcccagcttcttgggagtgcttattcagcccaagagtggaggctgtttacagngagccctggagatggcagcttgtctccag

SEQ ID NO: 352 - DNA, 347 bp, Homo sapiens
cctcgagggagattgccagcaccctgatggagagtgagatgatggagatcttgtcagtgctagctaagggtgaccacagccctgtcacaagggctgctgcagcctgcctggacaaagcagtggaatatgggcttatccaacccaaccaagatggagagtgagggggttgtccctgggcccaaggctcatgcacacgctacctattgtggcacggagagtaaggacggaagcagctttggctggtggtggctggcatgcccaatactcttgcccatcctcgcttgctgccctaggatgtcctctgttctgagtcagcggccacgttcagtcacacagccctgcttgga

SEQ ID NO: 353 - DNA, 359 bp, Homo sapiens
gtgttgaaggatctttgatagttgagaaaattatgcaaagttcctcagaagttggttatgatgctatggctggagattttgtgaatatggtggaaaaaggaatcattgacccaacaaaggttgtgagaactgctttattggatgctgctggtgtggcctctctgttaactacagcagaagttgtagtcacagaaattcctaaagaagagaaggaccctggaatgggtgcaatgggtggaatgggaggtggtatgggaggtggcatgttctaactcctagactagtgctttacctttattaatgaactgtgacaggaagcccaaggcagtgttcctcaccaataacttcagagaagtcag

SEQ ID NO: 354 - DNA, 251 bp, Homo sapiens
ccaccacacccaattccttgctggtatcatggcagccgccacgtgccaggattaccggctacatcatcaagtatgagaagcctgggtctcctcccagagaagtggtccctcggccccgccctggtgtcacagaggctactattactggcctggaaccgggaaccgaatatacaatttatgtcattgccctgaagaataatcagaagagcgagcccctgattggaaggaaaaagacagacgagcttccccaa

SEQ ID NO: 355 - DNA, 343 bp, Homo sapiens
ctgattttatttccttctcaaaaaaagttatttacagaaggtatatatcaacaatctgacaggcagtgaacttgacatgattagctggcatgattttttcttttttttcccccaaacattgtttttgtggccttgaattttaagacaaatattctacacggtatattgcacaggatggatggcaaaaaaagtttaaaaacaaaaacccttaacggaactgccttaaaaaggcagacgtcctagtgcctgtcatgttatattaaacatacatacacacaatctttttgcttattataatacagacttaaatgtacaaagatgttttccacttttttcaattttt

SEQ ID NO: 356 - DNA, 306 bp, Homo sapiens
  misc_feature 223, 233, 246, 259, 286, 288, 291: n = A,T,C or G
ctggtttgtgaaagttgggttttccagaatccagccagccagtccaattgcagagaggcacgcatggggtagtaggggttgtcgttgagaatggtgaaaatgtaggaggagttattgatggaggtagaggagtagttgttagagggctggaagtggtggttggtggaagggtggtcgtggtggttgttggagggctgggagtggtggttggtgaaggggtggncatggtggtnggtggacctcggncgcgaccacgctnagggcgaattccagcacactggctggncnggnctaattggatcctag

SEQ ID NO: 357 - DNA, 357 bp, Homo sapiens
  misc_feature 246, 255, 264, 324, 327, 332, 338, 348: n = A,T,C or G
aaaattgagtttccaggaaaaataggcactgatttctagaaggaaattaactccttaccgaagctatttattgagccaatatggctggttaacgtcctcactagtataaagtaacccagtgcaagactctcagacattagctgaaccaagtgtacacagtcagactgcaagggcactgatgaggctactctgaaagctggttgtccccgtcctctaggtgtgaggaccactctgattttatcccangggcccggnccattcttnccatactgcaaacctgcccgggcgggcgctcgaaagggcgaattccaacacactggcggncgntctantggatnccaactcggnaccaagctt

SEQ ID NO: 358 - DNA, 250 bp, Homo sapiens
ctgaggttgtcagtacaatgaaaccaaactggcgggatggaagcagattattctgccatttttccaggtctttgagttgcacgtcaaatctggggctgatcaccccacacttgtttagcctgcctgtgaggttcacaacaattttcccagctctgtggtcatcaatgatttcaaattcgccaatgtaaccatgcttcatcatcacagtgagaaaccggacgatgactttggagcacggcctaataagcac

SEQ ID NO: 359 - DNA, 469 bp, Homo sapiens
  misc_feature 415, 431, 435, 449, 457, 464: n = A,T,C or G
cctgccgtcgatgccagggaggccgacaggaccttcttttccggcggggccgatatttccaggggaaccaggaagacctctgggtcccatgagaccaggctccccagggcgaccagcatctccattaggtcctcggactccagcagggccacttgcaccacgactaccaggagggcccatgacgccagctctgccatcagctccaggaagaccacgagaaccaggactacctctcagcccaggaggtcctggagggccggcagatccagcttccccattagggcctctctttccttcttcaccactgggaccaggaggaccttggggcccagcagagccgggctcacccttgttaccgccctctcctttggagccagacctgcccgggcggccgctcgcaaggggcgaattccancacactggcgccgttnctantggatcccaactcngtaccaanctttggngtaaa

SEQ ID NO: 360 - DNA, 313 bp, Homo sapiens
cctgctcttctcttcaaagcacttagtacacagggttacaggtgctaccacttggattccccagagcatggaagtctgatcccaggttgaacatatttcttctgaaaatgagcatcttggttctatagattcttatcttgctcacaggacttgctccaaaactgaattttcagaagcagcatgatagggaaagagaaaaatggtactgactctgatccctaggaagcaccctgaacctcattcattgacaaggcagacatactgtaagcaataagcagttgtcagtgggaagtacccaccagccagacatttt

SEQ ID NO: 361 - DNA, 373 bp, Homo sapiens
  misc_feature 360, 362, 367: n = A,T,C or G
ccaatcggacaaaatagagttagcaaagccctcacagcaccctatgaaaaatctctgctcttatacaggattagatgcagacctcatcttgacctaacatctgtaaccaggtaagtgtatgagtaggaacacagacagcagtactgtatcagcaaaatctatcatattatttgaaatcactggatataatattaattataaagtgtatggttctctccagttgttcacataccaaatcccagtcagttctcagattcagatagatgtatctgcaatttctccaagctgctaagaaaaccttcaatggtcagttctgcttggtcatggtatgactcttttttttttttttttttaaaaggnanttttntttttt

SEQ ID NO: 362 - DNA, 536 bp, Homo sapiens
  misc_feature 479, 482, 485, 504, 512, 521, 531, 532, 533, 534, 535: n = A,T,C or G
ttgccatccccccgtttcaccaagaaggatgcaagcctcagggtgccagggggcactgagttaggcccagagctcactggcctctcgaaagacttgactggaatccctcataccaacctgcggtatgggggtctccctgcctctcgccctaggctgagctcaagacctggctccccaaatcaagtaactggctgccgcctactcaccccagttattatctcacccgacaccttagaagctaagaccaatgaccgtcaaaacctaaaacacacacctgggcacagtggctcacacctataatcccagcactttgggaggacgaggcgggcagatcacttgaggccaggagttcagcctggcagacatggtaaaaccccatctctaccaataatacaaaattagccgggcgtggtggcacacctgtagtgccagacctgcccgggcgggcgctaagggcgaattcagcacacttgcgccgntantanggatccaactcggtaccancttggcgnaatcatggnatagctggtnnnnng

SEQ ID NO: 363 - DNA, 276 bp, Homo sapiens
ctggttggctgatggtgactgcccagggtatgaagggttgctgaggtggggtggcggtggggcatcatggggaaggaccttgctggtcattgcttggtgtcggaggaattggctttgaaccagaacctgacctgtcacgaccactttgcccagtcccccagatcatcagccagggcccgtggctcaatctcatgcagcactacccaagggagttaggccctcagagagggaacagagaggaggctggggagcagcccagggctgggggatgagagg

SEQ ID NO: 364 - DNA, 540 bp, Homo sapiens
  misc_feature 536: n = A,T,C or G
aaaatcacgtacatgactcgcgttatatttctgctggacagcactgccccagccgtgtgtcagattctaccctaattgcttttcattcgttatctcatttaatcctttcagtaaccgattaggtgggtgttattgtgcttgtttttatagatgattaaacaagaaattaaataacttgtccaagttcatgcagccagtgagtagtggaggcggggtaagaactcaggcagtttgattcccagagtttcctgtgtcccaaatgctttgtgtgtgctatatttttgagaagcaggacaggaaaaatggttgcagcaccatggtttctaggtagattctagttcccatcacacttcgcgtcttaacttgcgggtaaccctaagcaagttacttaaaactttctatgcctcagcttgcatgtgtaaaatgagggaaataccttcaacctcttgaagttgttgagaagattgaataagaatgtgtataaaagcggccgggtgccgggggctcaccctgtaatcccaactactccggttttnggaa

SEQ ID NO: 365 - DNA, 416 bp, Homo sapiens
cctagttctgtcatgagtagtcggcctcgtgtctgtcctcccatcttggaacaaccttatcaacaggccgcactgcagaaatgatgttttatgaaaaccaatgaggctgctgccactccagcaagggaaataatgcagtttcctgtcttatttaagaaaaagagaaggctctcttttctcccttgtcattgccgttcttttccttacacgcaaagattttttaactattgcagattttcatcccattctactgcttgattgaccatcaactccatcctatcgagatttatttaagaatgaagaacataattttctgctgatgccgtaccctcacccttttcagcaaagaatagtggagagtaggaaactgtactttatctcggcatcctcttgaatgatagtgcaagtttctccag

SEQ ID NO: 366 - DNA, 221 bp, Homo sapiens
aaactcaggctccccattaactgtgtgtctgtgagcccagtttctcatctgtaaaatggggcaacagtggcactcatcttaaagggttggataataaaataatgcatgtaaggccctcagcatagtgcctggcacagaattactgctcaaatgttagctgtcgtattaatattgtcacttttgcacactgatgtacatttcctgttgaccaggcacttttt

SEQ ID NO: 367 - DNA, 173 bp, Homo sapiens
  misc_feature 155: n = A,T,C or G
ccatggctaggtttatagatagttgggtggttggtgtaaatgagtgaggcaggagtccgaggaggttagttgtggcaataaaaatgattaaggatactagtataagagatcaggttcgtcctttagtgttgtgtatggctatcatttgttttgangttagtttgattagtcat

SEQ ID NO: 368 - DNA, 344 bp, Homo sapiens
cctgctgtccaagcagagcacaaatgggttcctccgggacccctggtcctttttccagacgaggctgtggcactggtggaaagggagggagaatggagcctggcccttgtgtgtacaacaggaaatgcacctcaggacacagcaggagtcagcgggagggcacagacctgccccctgccaggcagaaaatgggcctcctcaagcacaaaagtgaccaagtacaattttcagttgctaaaacaagaaaaggcttcagctagtttcatttccatgtgtagttattttctcttttgaataagcaaaaccaagctaagctgtgtcagccaacttcatcctgaccaagg

SEQ ID NO: 369 - DNA, 410 bp, Homo sapiens
  misc_feature 356, 359: n = A,T,C or G
aaaacatctttagatttcagtgcaaaaatgtacccctggcacctcttaaaacgtaagagcaagctcaaaaacacgtagtgatggaaataagctagctacgctcaatgccatcgtcaatggtgagtggatacaatcaatccatgtggctcctgctcagctattaatgtctgtggtagaggatctctgacaagaggacctattatgtcaaaatgagtattcttgcaaatacccccccaccccccaaaacggcatgaacaaacggggacacctttccctgcacacagcaatcaaagacaagattaaggggccacccatcagtagccttgaagattttcagctaccaatatatgcacaanggncacatttggttcctgttttttttttaacatgacaatttcacactattaaca

SEQ ID NO: 370 - DNA, 541 bp, Homo sapiens
  misc_feature 478, 495, 498, 512, 516, 532, 535, 536: n = A,T,C or G
aaaagcaagaggcatctgtctgaggatgagggtaagcaaagtaggaaagagggtggagataagaacaccaaacacttttagctggagttatttatcactgcaaggggctagggacccagggcagaatctatacggtccaaggggagggacggtgttctggcatggcttagagttcctaataacaagggttaatacagtaacaggaattgatcatttctgggtgaggacagggcaatacgaaaaaatatacatttggaattttagctttttttttgcctctctactgtgtcactaaatatatctctgcactctcacacatccttgtccagtaaagcttcaggccaccagaatacacattttcttcactcgcatacacaacccctcacatcagcattggtgcactagactctgtaaaaatttttcagtcacacttttttgtttttacctgccccggcggccgctccaaaagggcgaattncacacaccttggcgcgnttncttatggatccgancttngtaccaaacttggggnaannttggg

SEQ ID NO: 371 - DNA, 357 bp, Homo sapiens
aaactcagtgaacccaaacctatttttttcaatctgaatattgctgcagcaaaaccaactccaccaaaaagccaggtaacattaacaaaagaattccctgtatcatctggatctcaacatcggaaaaaagaagcggatagtgtttatggagaatgggttcctgtggagaaaaatggtgaagaaaacaaagatgatgataatgttttcagcagcaatttgccctcagagcctgtggacatctctacagcaatgagtgaacgggcacttgctcagaaaagactcagtgagaatgcatttgatcttgaagccatgagcatgttaaatagagctcaggaaaggattgatgcctgggctcag

SEQ ID NO: 372 - DNA, 485 bp, Homo sapiens
  misc_feature 188, 205, 280, 312, 362, 390, 407, 410, 435, 441, 454, 455,464, 465: n = A,T,C or G
ccaccaatggtactgaacctacgagtacaccgactacggcggactaatcttcaactcctacatacttcccccattattcctagaaccaggcgacctgcgactccttgacgttgacaatcgagtagtactcccgattgaagcccccattcgtataataattacatcacaagacgtcttgcactcatganctgtccccacattaggnttaaaaacagatgcaattcccggacgtctaaaccaaaccactttcaccgctacacgaccgggggtatactacggncaatgctctgaaatctgtggagcaaaccacantttcatgcccatcgtcctagaattaattcccctaaaaatctttgaaatanggcccgtatttaccctatagcaacctcnggcgcgaccacgctaanggngaattccagcacacttggcgggcgntactantggattcgaactnnggaccaaanntggcggaataatgggcataa

SEQ ID NO: 373 - DNA, 543 bp, Homo sapiens
  misc_feature 457, 507, 533: n = A,T,C or G
ccagactcctggagatcgacccgtacttgaagccctacgccgtggacttccagcgcaggtataagcagtttagccaaattttgaagaacattggagaaaatgaaggtggtattgataaagttttccagaggctatgaatcatttggcgtccacagatgtgctgatggtggtttatactgcaaagaatgggccccgggagcagaaggagtttttcttactggagattttaatggttggaatccattttcgtacccatacaaaaaactggattatggaaaatgggagctgtatatcccaccaaagcagaataaatctgtactcgtgcctcatggatccaaattaaaggtagttattactagtaaaagcggagagatcttgtatcgtatttcaccgtgggcaaagtatgtggttcgtgaaggtgataatgtgaattatgattggatacactgggatccanaacactcatatgagtttaagcattcaaccaaagaagccacggagtctaanaattttgaatctcatgtgggaatttnttcccatgag

SEQ ID NO: 374 - DNA, 540 bp, Homo sapiens
  misc_feature 492: n = A,T,C or G
aaaatgtgctacaagcttacttctgtagtaatggagaaagatcctttccatgcaagttgtttacctgtacatatagggacgcttgtagagctgaataaagccaatgaacttttctatctttctcataaactggtggatttatatcctagtaatcctgtgtcttggtttgcagtgggatgttactatctcatggtcggtcataaaaatgaacatgccagaagatatctcagcaaagccacaacacttgagaaaacccatggacctgcatggatagcctatggacattcatttgcggtggagagtgagcacgaccaagcgatggctgcttacttcacagcagcacagctgatgaaagggtgtcatttgcctatgctgtatattggattagaatatggtttgaccaataactcaaaactagctgaaaggttcttcagccaagctctgagcattgcaccggaagacccttttgttatgcatgaggtcggcgtgggntgcatttcagaatggagaatggaaaacagcccgaaaaatggtttcttg

SEQ ID NO: 375 - DNA, 199 bp, Homo sapiens
caaggatgcagagtaaccgccatgttgtttatattctcaaagacagttcagcccgaccggctggaaaaggagccattattggtttcatcaaagctggatacaagaagctctttgtactggatgatcgtgaggctcataatgaggtagaaccactttgcatcctggacttttacatccatgagtctgtgcaacgccatgg

SEQ ID NO: 376 - DNA, 374 bp, Homo sapiens
ccagtcctacaaccagtattctcagagataccatcagagaacaaacactaatgttaattgcccaattgagtgcttcatgcctttagatgtacaggctgacagagaagattcccgagagtaaatcatctttccaatccagaggaacaagcatgtctctctgccaagatccatctaaactggagtgatgttagcagacccagcttagagttcttctttctttcttaagccctttgctctggaggaagttctccagcttcagctcaactcacagcttctccaagcatcaccctgggagtttcctgagggttttctcataaatgagggctgcacattgcctgttctgcttcgaagtattcaataccgctcagtatttt

SEQ ID NO: 377 - DNA, 540 bp, Homo sapiens
  misc_feature 539: n = A,T,C or G
aaaaaaagaattatctgtgaaccatacgtgattaataaagatttcctttaaggcagaggctggtcgagatgctgctgttatcttctgcctcagacagacagtataagtggtcttgtttctaagattcctaccaccagttactttgggccaagtatccacatccccttgcgtatgggaggtgggtgaagagtgttggatgcaaagtggttattatgggaagtagctcgatggtaaaaggacaaacacctatctatcttagagcttaagcctgtatgtgcttattcccaagggagatagaggtgtttaatcacaaggacagcatgagttagaggacactggcatcaacagctgccacagccgtgcacaccagggccagagcagcccactgacatctgtctttggtcttgagatcaaatgcatcccattcttcatacattagaaggtcgacctccttgaagcagaccaagtatagcaagcctctaaaaggactactgagaaacagaatcagaactctagactctagttagggcccttcagcng

SEQ ID NO: 378 - DNA, 368 bp, Homo sapiens
cctccaccatggccttcaagcagatggagcagatctctcagttcctgcaagcagctgagcgctatggcattaacaccactgacatcttccaaactgtggacctctgggaaggaaagaacatggcctgtgtgcagcggacgctgatgaatctgggtgggctggcagtagcccgagatgatgggctcttctctggggatcccaactggttccctaagaaatccaaggagaatcctcggaacttctcggataaccagctgcaagagggcaagaacgtgatcgggttacagatgggcaccaaccgcggggcgtctcaggcaggcatgactggctacgggatgccacgccagatcctctgatcccaccccagg

SEQ ID NO: 379 - DNA, 542 bp, Homo sapiens
  misc_feature 465, 488, 527, 530: n = A,T,C or G
ccaagccctccatctccagcaacaactccaaacccgtggaggacaaggatgctgtggccttcacctgtgaacctgaggctcagaacacaacctacctgtggtgggtaaatggtcagagcctcccagtcagtcccaggctgcagctgtccaatggcaacaggaccctcactctattcaatgtcacaagaaatgacgcaagagcctatgtatgtggaatccagaactcagtgagtgcaaaccgcagtgacccagtcaccctggatgtcctctatgggccggacacccccatcatttcccccccagactcgtcttacctttcgggagcgaacctcaacctctcctgccactcgggctctaacccatccccgcagtattcttggcgtatcaatgggataccgcagcaacacacacaagttctctttatcgccaaaatcacgccaaataataacgggacctatgcctgtnttgtctctaacttggctactggnccggaataattccatagtcaagaacatcacagtctctgnatntggaacttctcc

SEQ ID NO: 380 - DNA, 313 bp, Homo sapiens
ccttctaaatcataatagctctttcatgtctaaaaccattttatgatattgccaaaatgtgataggaaacctactcattaaattgttaaactttttaatgactatgtgaagatatgaattgtttcctgaagataatactcttaattgagttgtattgtacttcttaggcaaagcagtgtaaaactgtatcaattaaggcttgtgagtagtgatttccactggggcatcagagtcttggctgggctgaatctgctgcttgttggttcagtgtttcttatgaacaagagccacagtacagagcttcaagttattt

SEQ ID NO: 381 - DNA, 344 bp, Homo sapiens
ccttcagcaaatactcatagaagctgtctccaagtcctccaactgatacatgatgttgaccccactgtccactactgggattcagatagttaggataaaggccaggccatgttatgggatctcaacgaaggcaaacacctttacacgctagatggtggggacatcatcaacgccctgtgcttcagccctaaccgctactggctgtgtgctgccacaggccccagcatcaagatctgggatttagagggaaagatcattgtagatgaactgaagcaagaagttatcagtaccagcagcaaggcagaaccaccccagtgcacctccctggcctggtctgctgatgg

SEQ ID NO: 382 - DNA, 496 bp, Homo sapiens
aaacccatcatcagagaacaagagaaagtaatttcattttacacaaaacaagattcacatgtgccaaaaaagaaagacccaaaagaaacaaaaaccaaaaccctaatgctgacactgatggtcagtaccctgaacagtggcccaaaggccactgatcaaaaataaaatagtggctgtatatcaatgaaatgaaatccaagaagctttaaccctttggcatcagaaatccagatttttccaattatgtaaatgcttatttcttacatgccaagagtgggagaagtgaatgtgccaatgtggaaagaaaaaaagccaccactcactgggacacccagagaattggctttaacagacaattagggggttaggcagaaacccagaaatggttattagctgcttgtgtcatcaatttaagtggagatgactgagtcctaaggtacaatgtaaaaatgtatgtgggaaaatgtatgctgagtcgtagttttacctcggccgc

SEQ ID NO: 383 - DNA, 227 bp, Homo sapiens
aaatgttattttggaagacttacgatgcatgtatacaaacgaatagcagataatgatgactagttcacacataaagtccttttaaggagaaaatctaaaatgaaaagtggataaacagaacatttataagtgatcagttaatgcctaagagtgaaagtagttctattgacattcctcaagatatttaatatcaactgcattatgtattatgtctgcttaaatcattt

SEQ ID NO: 384 - DNA, 218 bp, Homo sapiens
  misc_feature 108, 109, 118, 127, 128, 167, 168, 169, 178, 187, 194, 206,208: n = A,T,C or G
ccaggcgctccttgtcggcatcagggagggtggccttgaactgctcatgggctgtggtcagtccctggatctcctcaatggtgtgcacaatgaaggtgtcctgcaggnnctccatggnccctccatnnaaattgttgaagggtgcagcccgcttggcatactccaannncagctgganaatggtctncaacagnttctcggtcctntncatagcttcc

SEQ ID NO: 385 - DNA, 100 bp, Homo sapiens
  misc_feature 53, 83, 85, 93: n = A,T,C or G
tacaagctttttttttttttttttttttttttttttttttttttttttttttnttttttttttttttttttttttcttttatntntttttttntttattt

SEQ ID NO: 386 - DNA, 548 bp, Homo sapiens
  misc_feature 485, 492, 512, 537: n = A,T,C or G
gaccatcatccttaggttcgccatccaggacatctccgtggaagagacctcggccaaggaagggctccttctctggtgccagagaaagacagccccgtataagaacgtcaatgtgcagaacttccacatcagctggaaggatggtcttgccttcaatgccctgatccaccggcacagaccagagctgattgagtatgacaagctgaggaaggacgaccctgtcaccaacctgaacaatgccttcgaagtggctgagaaatacctcgacatccccaagatgctggatgcagaggacatcgtgaacacggcccggcccgacgagaaggccataatgacctatgtgtccagcttctaccacgccttttcaggagcgcagaaggctgaaactgccgccaaccggatctgtaaggtgctggctgtcaaccaagaaaacgagcacctgatggaggactacgagaagctggacctgcccgggcggcccctcnaaagggngaattccaaccactggcggncgttactagtggattcgagctcggnaccaagcttgg

SEQ ID NO: 387 - DNA, 207 bp, Homo sapiens
ccaacatggtgaaaccctctctccactaaaaatacaaaaattagccaggaatggtggcgggcgcctgtagtcccagctacttgggaggctgaggcaggagaatcgcttgaacccgggaggtggaggctgcagtgagccaggatcgcgccactgcactccagcctgggcaacaagagcgaaactccatctcaaaaaaaaaaaaaaaaa

SEQ ID NO: 388 - DNA, 508 bp, Homo sapiens
  misc_feature 9, 312, 347, 349, 406, 431, 449, 455, 498: n = A,T,C or G
aaaagaatnaaataaaaacctgagaagtctaacgtgaagctaggactcctgcctgcttcccttcaggcacctgctgtgcctccttctccgcagatgctctggttggaagcctcctgcactgccttctgtaacagcaccagctggacgttgtcatgaaatgtcacgagttctgggtgtttcctggtctgcagtccgcagctccctgccatcggccacccgatctcacgatggcacagcagacaaactctgaggagcctcccaggagcctagggcttttcctccgccctcttctgtaagcagactggacagcangcccctgggatgttcacggggacagcacaggtggnanggggggcaatcttccactaagcaggtgacctgccccgtctttgcatttacaaatggngcatgcatcttttttcccttggtgntgtttggcgtgagattcncccccngcatccacggcactcttgtggtactgaagccgtgattcaagtntctttatctt

SEQ ID NO: 389 - DNA, 351 bp, Homo sapiens
cttgaagagaactgtcgtgtctgatttgcactattggaggaggactaaagttgcctgacaactttatgtgttatgccagaactctgagggcaaactgctgaaaaacaaagggtttaaggatgacatttctgaccatttgtgtgtttgttgttgttactgtttttgttttttttaatgtagacaatacagctttggaaggggaagtctcatacaggttataggtctttctctctctagatttcaggtgcttgcaactggactgcagactctaccaatcacgggcattttatcttctctgaacactgcagtttgttagactagagctgaggttggaggattccatagtgcttt

SEQ ID NO: 390 - DNA, 264 bp, Homo sapiens
cctcattgacaagtaggcccatctttgggccgcagccctgacctggaatgtctccacctcggattctgatctgatccttagggggtgccctggccccacggacccgactcagcttgagacactccagccaagggtcctccggacccgatcctgcagctctttctggaccttcaggcacccccaagcgtgcagctctgtcccagccttcactgtgtgtgagaggtctcctgggttggggcccagcccctctagagtagctggtgg

SEQ ID NO: 391 - DNA, 72 bp, Homo sapiens
  misc_feature 8, 23, 45: n = A,T,C or G
ccaccccnacaagcttcgccgangtgccgaccgaccgactgatcnccgacgccggctggaaggactacagat

SEQ ID NO: 392 - DNA, 510 bp, Homo sapiens
  misc_feature 401, 407, 429, 434, 454, 459, 466, 478, 487, 489, 503: n = A,T,C or G
cgcccggctaattttttttgtatttttagtagggatggagtttctccattttggtcaggctgttctggaactcccaacctcaggtgatccgcccgtcttggcctcccaaagtcctgggattacaggcgtgagccaccgcgcccagcctgttacaccattttatataaaggatttgagcatcctgaaatgttggtatctgtaggagtcctggaaccaacctcctatcgataccaagggacaacttttcatttttagctatgataaagtttataaattaggcatgagagactagcaatgataactaataaaatagaacaagtgtaacaatatgccagcatctctaatcttgtattttgcaaccattaccaagtaaataagggttactcagacacaagcactgntgtacnacaacagtggatgtgatcaccnaaacngctgctgagtaactaacgantgggncgccgtntacactgtggangtgctggananaggaaggatccccncctgggc

SEQ ID NO: 393 - DNA, 535 bp, Homo sapiens
  misc_feature 520: n = A,T,C or G
cctgagtcacctagcatagggttgcagcaagccctggattcagagtgttaaacagaggcttgccctcttcaggacaacagttccaattccaaggagcctacctgaggtccctactctcactggggtccccaggatgaaaacgacaatgtgcctttttattattatttatttggtggtcctgtgttatttaagagatcaaatgtataaccacctagctcttttcacctgacttagtaataactcatactaactggtttggatgcctgggttgtgacttctactgaccgctagataaacgtgtgcctgtcccccaggtggtgggaataatttacaatctgtccaaccagaaaagaatgtgtgtgtttgagcagcattgacacatatctgctttgataagagacttcctgattctctaggtcggttcgtggttatcccattgtggaaattcatctttgaatcccattgtcctatatcctaacaataagaaaaaatttctcaagtttcctgtgcggtcttctanctgcagcaatacttt

SEQ ID NO: 394 - DNA, 366 bp, Homo sapiens
aaaaactgccacttggagataaaaatcaagggcacaatgtactcagagagtattgagctatctggtatcccaaatgatgtgaatactttcagaaaccaatggcaaattgaacccacgtttcccagctatggagatattaatacattgattcaaatcccattactcaatccacatagccctgaggtcatcctgcaaagtgcgtatcaaaaaatacgaagttagggtgacaaagtttgacagtgatgttatacaagtcaaacttggaaggtcatagtaagcatacctatgctgagagaaaagcatcaaatcctttgtgtacacatttagttttattgtaacaaagcaacttgtacacttttaacgttt

SEQ ID NO: 395 - DNA, 544 bp, Homo sapiens
aaatatcaaggccacttaaaacaagactcagcaaaccaaagctatcacttctgcattaccctttgtcctcaattaactactttgaaaattacagccaagcaaaccacaaacattttaatggtttatgtttggatgatatgtctcctgcacatgcttccaccagaacaaaaaaggaaaaccaaagaagttcctttccacataaggcacaggacaaaattaatcccatttacatattcaaggcgaaaatgagtgttttcctggcttttgtttgtttcttttgctatcacatgtctatagattatagggactcaagcacattatccatgacagaaaattccactgttgtacaaaataaaattgttaattctaactttattcttatacaatttgcagaatagatttgaaatgattgctataggttttaatgttgataagaactggactataatacaactgaaatgcagttgagcttgacaagtacatttacctgcccgggcgggcgctaagggcgaattccagcacacttggcggccgttactagtgg

SEQ ID NO: 396 - DNA, 432 bp, Homo sapiens
  misc_feature 332, 335, 351, 370, 401, 404, 406, 412, 419, 421, 426: n = A,T,C or G
ccatgccctgtcccactgccctgtgccaggctgtcgggccaccagtgccctcttgagacagtctccattggctccaagggttctgtgagccacagaaggttgtgaaaggagaagagcctgaagtgtggcagcaccagggcagcccaaagcagggctgcgttgaaaatatcaaaggatctctttaggggtggctctgagggttggtgggattggagggggaaggggcgcctgggaggagtacagtcagcatctattcttgggcaccgggaggagccactctctggaatcttaaattaccaggtaggagtgagaatgctgattagcttgtaganctnaaggcacggttgccangcccctccgggtccttctntagttctccaggcccggtgtatctaaagcantgnanaggaanggccctntnggganccaggg

SEQ ID NO: 397 - DNA, 282 bp, Homo sapiens
ccatgtggctgcccggttccccttcatccatatgccactggactacatcctgccggagctgctcaagaatgccatgagagccacaatggagagtcacctagacactccctacaatgtcccagatgtggtcatcaccatcgccaacaatgatgtcgatctgatcatcaggatctcagaccgtggtggaggaatcgctcacaaagatctggaccgggtcatggactaccacttcactactgctgaggccagcacacaggacccccggatcagccccctctttgg

SEQ ID NO: 398 - DNA, 538 bp, Homo sapiens
  misc_feature 454, 482, 488, 494, 495, 508, 526, 531, 538: n = A,T,C or G
catgatgtcaggctcggcaacaggctccttgttgacactcaccacattgtttttcaagctgacttccagcttgtcaccttggagagactttagccgcaccagggccccgatgcctccgctaaccaggatttcatcaccaatgtggtatttcaggatgttggcaagttccttggcatctcccaagagtctgctccgttctcttggtggcagggctcggaaggcttcatttgtgggagcaaagactgtgtagactccttcccggttgagggtctccgtcagtcctgcagactggatggcagctaccagcatgctaaagcgattgtctcccttcaggacatccatgacagtccccattgggggggtcagcacccggtccatcgtgaacagggtcccgtacctccccctcttgtcgtgggccgcgatgcagctgttctcaatgcaagaggcttttacnataaacaaaaactcttagttttttgccnccagantttccnnggtctgtcatggnacaaaacttaaaagccanctggnctttaan

SEQ ID NO: 399 - DNA, 374 bp, Homo sapiens
ccaggggggccaagacctcagaatgaaaagcccacagctgctctgtcctcacccgctctggaggccagccctggtacaggcatgggggtgggggtcctaaaacccttcgtcagcgttcctggagcccttgccaagcttaccatgtgccccatgcatgtccttcacatcacaaaaacctgtccagccgcccaaggccatggtgtccaccgaatgccacaaacatgctgctgagcctcaaagctcttcaacctcccaccttgctgtcccctctcccctgacaagtgcgcagacaaggtaaaaatcccccaaagcagagatgtcgagggcccggagccacacaccacatccccgtgcatctttggcactctggctgg

SEQ ID NO: 400 - DNA, 316 bp, Homo sapiens
cctcgttcatgcgcgtctcgaagaagcgctgcaggccgatgatggactgcacgtctgccttgtcctcagttaacttgttgaattgcttgaacatgcggcccacatcctgggcaaactcctgtgggggagctgtagggaggtgacaacttctcccggaggcgggcacggatcagggtcagatccagggtgccaccgggctggtccagggagaaggtggagtcggtagccagctgatgcagggggcggcagggttcgtgacagaatagggccagcagtacacgctcacatttccgctggttggctggtgagagcttgg

SEQ ID NO: 401 - DNA, 469 bp, Homo sapiens
  misc_feature 454: n = A,T,C or G
ccaagaatctcttcgttcttcctgaaacacttactatactaacacagagtttgtaatagttgttgtggacagtacagacagagagaggatttctgtaactagagaagaactctataaaatgttagcgcatgaggacctaagaaaagctggattgctgatttttgctaataaacaagatgttaaagaatgcatgactgtagcagaaatctcccagtttttgaagctaacttctattaaagatcaccagtggcatatccaggcatgctgtgctctaactggcgagggattgtgccaaggacttgaatggatgatgtcacgacttaagattagatgatctctactgacctcttctcatagattttgtataaatgaagtgctggactttacctgaaagctgcaaaaattaatggtttagatatatttataataaactgatttacctgcccgggcgggncgctcgaaagggcga

SEQ ID NO: 402 - DNA, 512 bp, Homo sapiens
  misc_feature 118, 372, 385, 389, 390, 441, 449, 466, 479, 488, 496, 507: n = A,T,C or G
aaagtcctggtacttaacaggctaacgtagataaacaccttaataatctcagttaatactgtatttcaaaacacatttaactgttttctaatgctttgcattatcagttacaacctanagagacttttgagcctcatatttctttgatacttgaaatagagggagctagaacacttaatgtttaatctgttaaacctgctgcaagagccataactttgaggcattttctaaatgaactgtggggatccaggatttgtaatttcttgatttaaactttatgctgcataaatcacttatcggaaatgcacatttcatagtgtgaagcactcatttctaaaccttattatctaaggtaatatatgcacctttcanaaatttgtgttcnagtnngtaaagcatattaaaataatagcggctgcagaaaattacctgcccggcggncgtcaaanggcgaactcaccccttngcgcctccccccngatccgacncggaccancttggggaatnatggg

SEQ ID NO: 403 - DNA, 130 bp, Homo sapiens
ctggcaaagaaggcggcaaaggtccccgtggtgagactggccctgctggacgtcctggtgaagttggtccccctggtccccctggccctgctggcgagaaaggatcccctggtgctgatggtcctgacct

SEQ ID NO: 404 - DNA, 326 bp, Homo sapiens
  misc_feature 14, 15: n = A,T,C or G
aaatatcacaagtnngtcttaagtgtcatctggcatcttctttctgtagccaggtaactcttagatcttattcatcagcctgctgaacagttcctttttcagggacatagataccatccaaaaatttcctgatatcccttgtttttaactgttgtggcttgctgaatcaaagccgctgaatttgaaacaagctcaatgtcatttccttcaaggattaattcatctttctgggcttgagatactgaacaagcaacacctggtctcatccgaaccctgcggatatatttttcacccaagaaatttcggatttcaacaagagacccatt

SEQ ID NO: 405 - DNA, 499 bp, Homo sapiens
  misc_feature 169, 417, 434, 463, 465: n = A,T,C or G
cctagtatgaggagcgttatggagtggaagtgaaatcacatggctaggccggaggtcattaggagggctgagagggcccctgttaggggtcatgggctgggttttactatatgataggcatgtgattggtgggtcattatgtgttgtcgtgcaggtagaggcttactanaagtgtgaaaacgtaggcttggattaaggcgacagcgatttctaggatagtcagtagaattagaattgtgaagatgataagtgtagagggaaggttaatggttgatattgctagggtggcgcttccaattaggtgcatgagtaggtggcctgcagtaatgttagcggttaggcgtacggccagggctattggttgaatgagtaggctgatggtttcgataataactagtatggggataaggggtgtangtgtgccttgtggtaanaagtgggctagggcatttttaatcttaancnaaacctataatccttcccccctcttaagggatgg

SEQ ID NO: 406 - DNA, 224 bp, Homo sapiens
cgccctcataatcattttccttatctgcttcctagtcctgtatgcccttttcctaacactcacaacaaaactaactaatactaacatctcagacgctcaggaaatagaaaccgtctgaactatcctgcccgcatcatcctagtcctcatcgccctcccatccctacgcatcctttacataacagacgaggtcaacgatccctcccttaccatcaaatcaattgg

SEQ ID NO: 407 - DNA, 255 bp, Homo sapiens
gtgttgcttgttcagtatctcaagcccagaaagatgaattaatccttgaaggaaatgacattgagcttgtttcaaattcagcggctttgattcagtaagccacaacagttaaaaacaaggatatcaggaaatttttggatggtatctatgtctctgaaaaaggaactgttcagcaggctgatgaataagatctaagagttacctggctacagaaagaagatgccagatgacacttaagacctacttgtgatattt

SEQ ID NO: 408 - DNA, 643 bp, Homo sapiens
  misc_feature 24, 30, 47, 51, 53, 86, 305, 492, 598, 605, 642: n = A,T,C or G
tcgactcctatagggcgaataggnacctcnagaaaaataatcaagcngaananagtgtgatggatatctgcagaattcgcccttancgtggtcgcggccgaggtctggtgcctgctggccctgggggaggaggcaaagctgtggctcccagcaagcagagcaaaaagagttcgcccatggatcgaaacagtgacgagtatcggcaacgccgagagaggaacaacatggctgtgaaaaagagccggttgaaaagcaagcagaaagcacaagacacactgcagagagtcaatcagctcaaagaaganaatgaacggttggaagcaaaaatcaaattgctgaccaaggaattaagtgtactcaaagatttgtttcttgagcatgcacacaaccttgcagacaacgtacagtccattagcactgaaaatacgacagcagatggcgacaatgcaggacagtagacctcaccctttccagactttagagcttgtggcnttgaatgttaaaggtgtgaccaccgacaccactcatgtcaatggctgaaagttgtccatttccatgactcaaagacccattggaggctattttctggggatcagcncttgaancagttgaatagctaaaaatgttaagccttgtatttcng

SEQ ID NO: 409 - DNA, 239 bp, Homo sapiens
ctggatcagacgcaagttatcggccgcctccaggaacgccgaccactccactttaggtatcatacgcgccacgaagttggggttgaattccacagggcagatacggacctcggtggcctggaggcgcagggggaagccacgggaccccaccccccgcacatgcgagctcagcagattgtgggtaagcagtttcatgtcgccgcacaaactctcgccaggccggaaccggaaaaaggtcg

SEQ ID NO: 410 - DNA, 531 bp, Homo sapiens
  misc_feature 480, 509, 531: n = A,T,C or G
ccgcaaagggaagaaaagcaaaagacgaaaatggctaaattcgtgatccgcccagccactgccgccgactgcagtgacatactgcggctgatcaaggagctggctaaatatgaatacatggaagaacaagtaatcttaactgaaaaagatctgctagaagatggttttggagagcaccccttttaccactgcctggttgcagaagtgccgaaagagcactggactccggaaggacacagcattgttggttttgccatgtactattttacctatgacccgtggattggcaagttattgtatcttgaggacttcttcgtgatgagtgattatagaggctttggcataggatcagaaattctgaagaatctaagccaggttgcaatgaggtgtcgctgcagcagcatgcacttcttggtagcagaatggaatgaaccatccatcaacttctataaaagaagaagtgcttcttgatctgtccantgaaaaaggttggagactgttcaagatcnacaaggagtctttgctaaaaan

SEQ ID NO: 411 - DNA, 412 bp, Homo sapiens
  misc_feature 8, 22, 35, 38, 105, 115, 141, 146, 156, 210, 293, 298, 322,363, 370, 372, 373, 381, 392, 399, 403: n = A,T,C or G
ctgcacantactcttggtttgncaatgggactttncancaatccacccaagagctctttatccccaacatcactgtgaataatagtggatcctatacgtgccaancccataactnagacactggcctcaataggaccacantcacnacgatcacantctatgcagagccacccaaacccttcatcaccagcaacaactccaaccccgtgnaggatgaggatgctgtagccttaacctgtgaacctgagattcagaacacaacctacctgtggtgggtaaataatcagagcctnccggncagtcccaggctgcagacctctgncgcgaccacgctaatggcgaattcccacacactggcggtcnttacttngnncgatgacnacctctatggncgaattncagnacaacttgg

SEQ ID NO: 412 - DNA, 365 bp, Homo sapiens
gtgacaacttatgataaaaactagagctagtgaattagcctatttgtaaatacctttgttataattgataggatacatcttggacatggaattgttaagccacctctgagcagtgtatgtcaggacttgttcattaggttggcagcagaggggcagaaggaattatacaggtagagatgtatgcagatgtgtccatatatgtccatatttacattttgatagccattgatgtatgcatctcttggctgtactataagaacacattaattcaatggaaatacactttgctaatattttaatggtatagatctgctaatgaattctcttaaaaacatactgtattctgttgctgtgtgtttcatttt

SEQ ID NO: 413 - DNA, 386 bp, Homo sapiens; identical to SEQ ID NO: 141

SEQ ID NO: 414 - DNA, 185 bp, Homo sapiens
gtgaacggagagcgtagtgaccatcatgagcctcctcaacaagcccaagagtgagatgaccccagaggagctgcagaagcgagaggaggaggaatttaacaccggtccactctctgtgctcacacagtcagtcaagaacaatacccaagtgctcatcaactgccgcaacaataagaaactcctgg

SEQ ID NO: 415 - DNA, 342 bp, Homo sapiens
  misc_feature 18, 20, 22, 137, 142, 159, 177, 183: n = A,T,C or G
ctgctgatacccacgcantntntgatgctgtcacctaccagctcggtttccacagcattgaactgaatgagcctccactggtccacacagcagccagcctctttaaggagatgtgttaccgataccgggaagacctnatggngggaatcatcatcgcangctgggaccctcaagaangagggnaggtgtactcagtgcctatggggggtatgatggtaaggcagtcctttgccattggaggctccgggagctcctacatctatggctatgttgatgctacctaccgggaaggcatgaccaaggaagagtgtctgcaattcactgccaatgctctcgctttgg

SEQ ID NO: 416 - DNA, 170 bp, Homo sapiens
aaaattataaacacaattcctagctcacaggccataaaaagcaggcagcaggctggatttgatccacaggccatagttggctgtctcttaaacaggcttttatacgttatgcaaagtgtttcaaattccagagactttggagacttttcgttttttagatttctcatttt

SEQ ID NO: 417 - DNA, 286 bp, Homo sapiens
ctgacagaactcaaacaggccatcgaatactggacagtcctcaccaacgttgaatctctgcatctgcttgctgtactccgacatgttatctggacggatggagcgcaagaatttaatgtagtcatcgctgtggtacttggtcatctcctcagcattggctttgtgagggcgatagatttccatttttcggtagagaccatagttgagcagcaaattatgagtcatgcggattcggtgaggcttcattgggtggccttgtccataatagtaatttccaacatccccg

SEQ ID NO: 418 - DNA, 522 bp, Homo sapiens
  misc_feature 490, 497, 507, 522: n = A,T,C or G
ctgctggttcagattgcagcggaaaacaacctgggagagggcgtcattgtcaagatcaagttcaatatcatcgcctctctctatgactacaaccccaacctggcaacctacatgaagccagagatgtgggggaagtgcctggactgcatcaatgagctgatggatatcctgtttgcaaatcccaacatttttgttggagagaatattctggaagagagtgagaacctgcacaacgctgaccagccactgcgtgtccgtggctgcatcctaactctggtggaacgaatggatgaagaatttaccaaaataatgcaaaatactgaccctcactcccaagagtacgtggagcacttgaaggatgaggcccgggtgtgtgccatcatcgagcgtgtgcagcgctacctggaggagaagggcactaccgaggaggtctgccgcatctacctgacctgccgggcgggccgctcccaagggcgaattccacacactngcgccgntactatggantcccacttcgtccan

SEQ ID NO: 419 - DNA, 421 bp, Homo sapiens
cctacctcacccatttcttcttgcgttatgtgaaccagaggaccctgggcaccttcctgctgggtatcctgctcatgctggacgtgatgatcataatctacttttcccgcctcctccgctctgacttctgccctgagcatgtccccaagaagcaacgcaaagacaagttcttgactgagtgaggggcacagagcctgggacaacaaaaacggacaaggccagaaacagcttcatatggacactgggacttaaccccaagcctgggtgtcctctgaggccagcctctccaccttctgagccactgcgctcagccattaatgattttttaatgttgattacatgttgaaataataatttgcttatgttaagtaaatggtattaaaattcttttcatctggttattttcatgtcttaagggtgg

SEQ ID NO: 420 - DNA, 342 bp, Homo sapiens
ctgctggattccagattctgggtccccaatccctctgcccagtccctcaatgttgaaacctcatctcttgaaggcagatcctgatattccaaggcactgaatcccaagccctgaatccccggtttctgatctgaatcttccaggcgccgggtcccaaatgttcaggccccaagtctagatcctggcagcccagtcacagagtatcccacacacactggtgcccagagccggcttctcatgacatgaaattgcatggtcgagggagtctgtggggaaggaagcccaggtcctggctgcaacctgcacggatgctggattccccctcaccccacctctgcatgg

SEQ ID NO: 421 - DNA, 279 bp, Homo sapiens
ctgaccccgcctgagggctcctcaaagtctgagcaagaccaggcagaaaatgagggcgaggactcggctgtgttgatggagagactgtgcaagtacatctacgccaaggaccgcacagaccggatccgcacatgtgccatcctctgccacatctaccaccatgctctgcactcgcgctggtaccaggcccgcgacctcatgctcatgagccacttgcaggacaacattcagcatgcagacccgccagtgcagatcctttacaaccgcaccatggtgcag

SEQ ID NO: 422 - DNA, 521 bp, Homo sapiens
  misc_feature 475, 515: n = A,T,C or G
ccaaaaggaaaaaatagcaattcagtggttaattggtgaaagcaggaaatgtatgccctttactgtgctgctgttgctgctgttgttgctgctgttgttgctgctgttgctgctgcggcaggtgctgctgctgctgctgctgctgctgctttggtcttcttagttttgttctttttgtctctcttcttcaacccatccatgttagctctaaggaggtttgaataagccatctgaaacttattcacttccttggagctcaccacagtgctgatcttcttcttcccatcggtagctcttaacagacacttgttgtctgcgggctcaaagccctccacagtacctttctttggaatgggtttggttcgaccgtcatacttcttcaaggtgatatagacgctgcccgacgtccggcacttctggaaaagtctggtcagctccgtcaggaactgctcgctctccacaacaccatcgcggngacgctggcacctgcccgggcggcccttaagggcgaattncaccct

SEQ ID NO: 423 - DNA, 514 bp, Homo sapiens
ccaagccttttcctttgaggctcagggcgggctggctaacattgctatattgaacaacaacttgaataccttgatccagcgttccaaccacactcaggccaccaacgatccccctgaggtgaccgtgtttccaaggagcctgtggagctgggccagcccaacaccctcatctgccacattgacaagttcttcccaccagtgctcaacgtcacgtggctgtgcaacggggagctggtcactgagggtgtcgctgagagcctcttcctgcccagaacagattacagcttccacaagttccattacctgacctttgtgccctcagcagaggacttctatgactgcagggtggagcactggggcttggaccagcccgctcctcaagcactgggaggcccaagagccaatccagatgcctgagacaacggagactgtgctctgtgccccgggcctggtgctgggcctagtcggcatcatcgtgggcaccgtcctcatcataaagtctctgcgttctgga

SEQ ID NO: 424 - DNA, 526 bp, Homo sapiens
  misc_feature 402, 458, 469, 507, 510, 521: n = A,T,C or G
ccagcctccactcccactctgccagacaccctgacacccacccaggctttgaagagcatggagggggagcctcagagctgacagtcctgcttagagcccttaaaaagacttgaaagttcactgggactcagtttaccttaatgccttagcagaagataaatcctacctagagacctttgttccttaaagcaataactgacaactctttgtagtcctccttgtgggtagttaagagtggggtcacccctttaactccaagcactacattttggcggctgccggcctctgggggaggtggcagttatgctgttactagtgattttagggctttgttatttaacttatttcaagggtgctgtgctcagccctgcccatggctgtgcagctccctccgtgcctcanatctgctgtagccagtgcagacctcactgtcgtgtccatgccacccccggcatggntccagacctcnggccgcgaccacgctaagggcgaattccagcacacttncgnccggtactaantggaa

SEQ ID NO: 425 - DNA, 550 bp, Homo sapiens
  misc_feature 243, 306, 347, 397, 418, 432, 459, 460, 482, 491, 507, 518,524, 528, 531, 546, 548, 549: n = A,T,C or G
ctgaaggcagcgggtgcacgtgcgtcccagacaccaccatggaggctgctactgttaccaaaaggaactcaagctacaagggggcaggtgctcctcagctcctccactaaagtgcaacacttcttcttctgaccgcatcagggagcagtcacaggccccactggatatcctgcaatgcccggcaggtgcctgggctagtcctgcgatgggccagcaggccagagtgggtggtgctgccctcangatgtgtagctgcagtagatggatgcaatactggtgtggtgtggaatgaggggctggacccanagggcctgctttggccggggtgaattctctggcttcagtanggttcactttcctttcctgacagttggctttctcttggggtcaagaaganaaccctggggccctaaggaanatcttgggggtctnaaaaaaaagccttcaaaaggggaaaannaaatttgaaggggccttgaaancccctaaanggaacttgaaccattngaaggaccaanttctgnttcncancacctttcgggtcgngnnt

SEQ ID NO: 426 - DNA, 256 bp, Homo sapiens
ccccagactcgtcttacctttcgggagcgaacctcaacctctcctgccactcggcctctaacccatccccgcagtattcttggcgtatcaatgggataccgcagcaacacacacaagttctctttatcgccaaaatcacgccaaataataacgggacctatgcctgttttgtctctaacttggctactggccgcaataattccatagtcaagagcatcacagtctctgcatctggaacttctcctggtctctcaga

SEQ ID NO: 427 - DNA, 303 bp, Homo sapiens
ccaaagagatccagaccacgacagggaaccagcaggtgttggtgcggaaactggacctgtctgatactaagtctattcgagcttttgctaagggcttcttagctgaggaaaagcacctccacgttttgatcaacaatgcaggagtgatgatgtgtccgtactcgaagacagcagatggctttgagatgcacataggagtcaaccacttgggtcacttcctcctaacccatctgctgctagagaaactaaaggaatcagccccatcaaggatagtaaatgtgtcttccctcacacatcacacct

SEQ ID NO: 428 - DNA, 365 bp, Homo sapiens
  misc_feature 48, 124, 133, 151, 161, 226, 254, 265, 285, 309, 312, 325,331, 333, 339, 341, 350, 351: n = A,T,C or G
ctgcagcctgggactgaccgggaggctctgaccatttacccaccacangtaggttgtgttctgaacctcaggttcacaggttaaggctacagcatcctcatcctccacggggttggagttgttnctggtgatnaaaaggtttgggtggctntgcataaacntgtgatcttcctgactgtggtcctattgaggccagtgtcttgaattatgggcttggcacgtatanggatccactattattcacacagatgttngggataaaganctctttgggtggattgctgnaaagtcccattgacaaaccataantanctgctgcaggtgnggttanangctccntncaagaaaannttcaaattttcccc

SEQ ID NO: 429 - DNA, 462 bp, Homo sapiens
  misc_feature 302, 423, 441, 445, 457: n = A,T,C or G
agctggggatgtctgttatgctgatgtgcagaaggatggagtggggatggtcgagtatctcagaaaagaagacatggaatatgccctgcgtaaactggatgacaccaaattccgctctcatgagggtgaaacttcctacatccgagtttatcctgagagaagcaccagctatggctactcacggtctcggtctgggtcaaggggccgtgactctccataccaaagtaggggttccccacactacttctctcctttcaggccctactgagacaggtgatgggaattttttctttattttttangttaactgagctgctttgtgctcagaatctacattccagattgaggatttagtgtcttaggaaatttttttaatttttttttttacctgcccgggcggccgctccaaagggcgaattccancacccttgcggcccgttnctanttggatcccaanctcgg

SEQ ID NO: 430 - DNA, 533 bp, Homo sapiens
  misc_feature 133, 319, 435, 533: n = A,T,C or G
ctgctaggtgtaaggagaagatggttaggtctacggaggctccagggtgggagtagttccctgctaagggagggtagactgttcaacctgttcctgctccggcctccactatagcagatgcgagcaggagtangagagagggaggtaagagtcagaagcttatgttgtttatgcggggaaacgccatatcgggggcaccgattattaggggaactagtcagttgccaaagcctccgattatgatgggtattactatgaagaagattattacaaatgcatgggctgtgacgataacgttgtagatgtggtcgttacctanaaggttgcctggctggcccagctcggctcgaataaggaggcttagagctgtgcctaggactccagctcatgcgccgaataataggtatagtgttccaatgtctttgtggtttgtanaaaaataagtcaaacggtccggcgaacatcagtgggggtgaaggtaaaatggcttgaatgaagcattggacttgtaaatctaaagacaggggttaggn

SEQ ID NO: 431 - DNA, 361 bp, Homo sapiens
  misc_feature 345: n = A,T,C or G
ctgctggaggttattactgcaaatgcagtgccttgtacatagggacccactgtgagataagcgtcaatccgtgttcctccaacccatgcctctatgggggcacgtgtgttgtcgacaacggaggctttgtttgccagtgtagaggattatatactggtcagaggtgtcagcttagtccatactgcaaagatgaaccctgtaagaatggcggaacatgctttgacagtttggatggcgccgtttgtcagtgtgattcgggttttaggggagaaaggtgtcagagtgatatcgacgagtgctctggaaacccttgcctgcacggggccctctgtgagaacacgcacngctcctatcactgcaa

SEQ ID NO: 432 - DNA, 539 bp, Homo sapiens
  misc_feature 326, 427, 440, 460, 482, 507, 517, 520, 535, 539: n = A,T,C or G
gtgccactgtcccctactttgcagagggctccggggggccagtgcccactaccagcaccttgattcttcctccagagtacagttcttggggctacccctatgaggccccaccgtcttatgagcagagcttgcggcggcgtggaacccagcctgacccctgagagctgaccccgtgctgccttctccagcagactacttctgataaaattgtttggaaggtcacgacctcgcaaaaacttttcaagagcaacaaggaagaattctgctgtgaagaacacagtgtacggatcctccgcatattatctcaacagaggacagtagctcangaggcagcttcaaacggtgacctgtggcctgggccatctcttcgtcatgtgcttcacttttccctgtttccctgtgaactggcttccatggtttcttgtangggtagtgagtcnggggttgtggcttgcagcanaaccaggaagatctttgccccnagtgggagcaacccacccccttgtncccaatgccntcnctctgggctttaaangcan

SEQ ID NO: 433 - DNA, 539 bp, Homo sapiens
  misc_feature 426, 488, 507, 509, 517, 531, 539: n = A,T,C or G
aaaacatctttagatttcagtgcaaaaatgtacccctggcacctcttaaaacgtaagagcaagctcaaaaacacgtagtgatggaaataagctagctacgctcaatgccatcgtcaatggtgagtggatacaatcaatccatgtggctcctgctcagctattaatgtctgtggtaagaggatctctgacaagaggacctattatgtcaaaatgagtattcttgcaaatacccccccaccccccaaaacggcatgaacaaacggggacacctttccctgcacacagcaatcaaagacaagattaaggggccacccatcagtagccttgaagattttcagctaccaatatatgcacaaggtcacatttggttcctgttttttttttaacatgacaatttcacactattaacaggcacacgggcctggntgtacgtttttaactatgacatttccccatatgatattccaaggacctgcccggccggccgntgaaagggcggaattccancncacttggnggccgttactaagnggatcccn

SEQ ID NO: 434 - DNA, 528 bp, Homo sapiens
  misc_feature 461, 480, 487, 493, 507: n = A,T,C or G
ccaccgattcgctgggggaggcagcacttaatgaggagcactctgagtctccctcctcctcttcattctcatcacggctacaacagtcttccaaaccatctactagttcttcttctgtatcttcagtctcagcctgatctggctggaggtcagtagctgaactaatatccctatcagatgagtccagctccctggcctcctcaggtctctctcaggcaggggaagccaaaaggccagggtgaggctcgaatcaaggcaaaaaaagggctgtgggtggtgagatgtactggggacagtcctagaaactgcctacctccatgttggtggccctcaagggacctgcattgtagcctaagacctgcaggagtaatgtgttgactcagggtattagaaaggactggatctggcaaccacaggatctaaagcctacggaggctgcttgggctggagcacatcgccanggagatggggtgggtgganaaggaantgttanggcccggtgctcantacccctggtcagaccccaaa

SEQ ID NO: 435 - DNA, 474 bp, Homo sapiens
  misc_feature 433, 437, 455, 461, 462: n = A,T,C or G
aaaaaagcaacttccagggttgtcattgtacaggttttgcccagtctcctatagcatggtatagtgataactgattttttataacaatgactcagaggcattgaagatccataactatcttctgaattatcacagaaagaagaaagttagaagagtttaatgttaagtgtattaaaaatcatattctaattcttttaatttggttatctgagtatgataatataggagagctcagataacaagaaaaggcaattggttagaacactccattcccacaggatgtgcattaacagactttttactgcatatgtctttatatagtttgcaaactaattcaaccattttacacagcattaattttttttttttaactgggttgacattgggctgaaacatttgcttatcatcttataattattttttcctgttctgnaaanggattttaccccctcctnacatanngtttggacttta

SEQ ID NO: 436 - DNA, 306 bp, Homo sapiens
caggaccagggagaccaaactcaccatggagacccctttctcctggtttgccaacttcaccagcgggacctgaggggccaggcagaccctggaagcctggaggaccagcggggaccctgttaccttttccaccttgaacaccctgtggtccaggaggtccctgagcaccattgtttccatcaggacctggagcaccccgagcaccagcaagaccagcatgacctttatcaccgtttttgccaggatcaccagtggggcctttgggtccagggaatccaatgttgccaggctctcctcttgctccag

SEQ ID NO: 437 - DNA, 76 bp, Homo sapiens
  misc_feature 8, 11, 18, 23, 25, 36, 40, 45, 46, 50, 56, 62, 63, 68: n = A,T,C or G
tgcagacnggnactgacngggangntatgaccattnaccnaccannggtnggctgngttctnnacctnatgatcac

SEQ ID NO: 438 - DNA, 524 bp, Homo sapiens
  misc_feature 509: n = A,T,C or G
ctgaaccctcgtggagccattcatacaggtccctaattaaggaacaagtgattatgctacctttgcacggttagggtaccgcggccgttaaacatgtgtcactgggcaggcggtgcctctaatactggtgatgctagaggtgatgtttttggtaaacaggcggggtaagatttgccgagttccttttactttttttaacctttccttatgagcatgcctgtgttgggttgacagtgagggtaataatgacttgttggttgattgtagatattgggctgttaattgtcagttcagtgttttaatctgacgcaggcttatgcagaggagaatgttttcatgttacttatactaacattagttcttctatagggtgatagattggtccaattgggtgtgaggagttcagttatatgtttgggattttttaggtagtgggtgttgagcttgaacgctttcttaattggtgggtgcttttaggcctactatgggtggtaaattttttactctcnttacaagggtttttc

SEQ ID NO: 439 - DNA, 527 bp, Homo sapiens
  misc_feature 146, 475, 500, 518, 524, 525: n = A,T,C or G
ttgccccttaacagtctattctaacccctgtaaaacagggactaaaagtactaacctcattgtaatgaggtttaagagaaggcccagcactaagccaggctctcaggaaaattcaaacaacagttcctctttgcccttcaatatanccccttctcatctgtcatgggctgaagaaccactggacctggctctcagtagcggtagtgatccggcttgaaggggccatcacaggacatgcccaggtactgggcttgcttctcagttagcttggtcaacttcacattcagcttgcccaggtgggcttcagccactgcctcatccagcttcttgggcaggaaatgaaccccaacggggtacttgtctggatgggtccacagctcgatctgcgccatcacctgggttggtgaaggagttactcatcacgaagctggggtggcccatgggacaaacccaggttgaccagccgaccctcggncatcaggatgatgcggcgcccattnttcaaccgatccggtccncacctnngc

SEQ ID NO: 440 - DNA, 133 bp, Homo sapiens
gtggagagtaggcccaggccccatgaggcaccagtggaagcacagctccaagttcagacaggtgcccttagagaggaaaaccatgacaggcaaatgcatttcctctggagtttgagaccctgacaaacaacag

SEQ ID NO: 441 - DNA, 407 bp, Homo sapiens
ccaactggcgaaaccctgtctctactaaaaatacaaaaattagcctggtgtcatggcacgcacctgtaatcccagctcctcgggaggctgaggcaggagaattgcttgaacccgggaggtggagattgcagtgagcccagatcgcaccactgcactccagtctggcaacagagcaagactccatctcaaaaagaaaagaaaagaagactctgacctgtactcttgaatacaagtttctgataccactgcactgtctgagaatttccaaaactttaatgaactaactgacagcttcatgaaactgtccaccaagatcaagcagagaaaataattaatttcatgggactaaatgaactaatgaggataatattttcataattttttatttgaaattttgctgattcttt

SEQ ID NO: 442 - DNA, 294 bp, Homo sapiens
ccacaaagccattgtatgtagctttagctcagcgcaaagaagagcgccaggctcacctcactaaccagtatatgcagagaatggcaagtgtacgagctgttcccaaccctgtaatcaacccctaccagccagcacctccttcaggttacttcatggcagctatcccacagactcagaaccgtgctgcatactatcctcctagccaaattgctcaactaagaccaagtcctcgctggactgctcagagtgccagacctcatccattccaaaatatgcccggtgctatccgcccag

SEQ ID NO: 443 - DNA, 366 bp, Homo sapiens
  misc_feature 17, 44, 85, 101, 123, 157, 211, 261, 266, 279, 286, 287,289, 298, 342, 349, 361: n = A,T,C or G
ctgtccaatggcaacangaccctcactctattcaatgtcacaanaaatgacgcaagagcctatgtatgtggaatccagaactcantgagtgcaaaccgcantgacccagtcaccctggatgtnctctatgggccggacaccccccatcattttcccnccagaatcgtcttacctttctgggagcgaaccttaacctctcctgccactcggnctctaacccatcccccgcagtattcttggcgtatcaatgggatatcgcancaacncacacaatttctntttatcnntnaaaatcacnccaaataataacgggacctatgcctgttttgctctaacttgggntactggnccgcaataattncatag

SEQ ID NO: 444 - DNA, 239 bp, Homo sapiens
ccaaacttgcatttgcattttgcactcatgacgatgatgatgcccatggcgcacagaaccccagcgcagatgagcccgccaacctggaggctgtgccagtcatagtagaaaggactgtttttatcttctaggtcattggcgtccaggacaggaaagcctgccaggaacacaagcaggcccagggtcaccttctgcatgtcagagcgctggcctgtgtggttccccaggctgagcagaga

SEQ ID NO: 445 - DNA, 284 bp, Homo sapiens
aaagtggattacaaccggctaggctacacacacctgtactcttccactcaggtatccgtgcggccactccagcacacgcagtatgagcgcttcatcccctcggcctacccctactacgccagcgccttctccatgatgctggggctcttcatcttcagcatcgtcttcttgcacatgaaggagaaggagaagtccgactgaggggctagagccctctccgcacagcgtggagacggggcaaggaggggggttattaggattggtggttttgttttgctttgttt

SEQ ID NO: 446 - DNA, 532 bp, Homo sapiens
gtggtcctgcccagaggtggcctgccacttggtgaagattctaagaggagcagggactattggggctgagaggtagccactaccaccccactaggcaggggagcagagaggggccctaggcattgctctgaacccataccagtgaggggagagagaatgaatgatactgataccctccctgggctggggaagccatggacccctctgcctgcactccatgacttgcacttactctggccctctgcaaggagctcatctcgcctccaaggatgtgcacagaaatggtttgttcttgggaagggagacaaggtgcttgggacatttaacttgccaagtgtggttgcctagaagcaagaggaagagcaagacgactctggcaggcccagacccactgacggtggcccatgaagcccctgctgggaaactgggaaggggcacccagtgttgggcagaagaggaagtcaggaaagcagggggttgtgaagccttccacaatcctgccagggacagtggaaatgtgctgcttcaaggg

SEQ ID NO: 447 - DNA, 199 bp, Homo sapiens
ctggacatcgattattgtgagcctaatccctgccagaacggtgcccagtgctacaaccgtgccagtgactatttctgcaagtgccccgaggactatgagggcaagaactgctcacacctgaaagaccactgccgcacgaccccctgtgaagtgattgacagtgagagtgtcaacctgcaaaggcaattaacttattttt

SEQ ID NO: 448 - DNA, 222 bp, Homo sapiens
  misc_feature 23, 58, 64, 118, 134, 173: n = A,T,C or G
ccaggctccactcctggggccanagtgaaaccggggtttaatcactgggctatgtggnctctgngtctctggcctgaatgaaatctcttcaatgtcgggggacagggatccctggaanagcgtgaaaaatacangtggtcactgtgcagttctctctgtggagcctgtcctgncatcatacaaggtgctgtgacagcaatgcaatgtgaaaggagatcaaat

SEQ ID NO: 449 - DNA, 376 bp, Homo sapiens
  misc_feature 320, 352: n = A,T,C or G
aaaacttttttttaactaataatggctttgaaagaagaggcttaatttgggggtggtaactaaaatcaaaagaaatgattgacttgagggtctctgtttggtaagaatacatcattagcttaaataagcagcagaaggttagttttaattatgtagcttctgttaatattaagtgttttttgtctgttttacctcaatttgaacagataagtttgcctgcatgctggacatgcctcacaaccatgaatagcccgtactagatcttgggaacatggatcttagagtcactttggtataagttcttatataaatacccccanccttttgagaacggggcttgttaaaggacgcngtatgtagggcccgtacctactgg

SEQ ID NO: 450 - DNA, 383 bp, Homo sapiens
  misc_feature 163, 182, 184, 221, 223, 230, 239, 266, 269, 287, 365, 368: n = A,T,C or G
tttttttcacatgagggtgttttctcgtgtgaatgagggttttatgttgttaatgtggtgggtgagtgagccccattgtgttgtggtaaatatgtagagggagtatagggctgtgactagtatgttgagtcctgtaagtaggagagtgatatttgatcagganaacgtggttactagcacananagttctcccagtaggttaatatggggggtaaggcgangntagcgangcttgctanaagtcatcaaaaagctattagtgggancanagttttgaagtccttganaagaggaataaccctgccccgggcgggccgcttcaaagggccgaaatttcccagcaccaccttgggcgggcccggttnccntaaattgggaatccc

SEQ ID NO: 451 - DNA, 250 bp, Homo sapiens
  misc_feature 13, 36: n = A,T,C or G
ctccctcctccantccagggactgcaaccgcccttncagcactgagaagcacagccaccacacccacagctaccagcgttacaaccatcccctcttcctccctgggcaccgcctggacccgcctatcacagaccaccacacccacggccaccatgtccacagccacaccctcctccactccagagactgtccacacctccacagtgcttaccaccacggccaccacaaccggggccaccggctctgtgga

SEQ ID NO: 452 - DNA, 413 bp, Homo sapiens
  misc_feature 300, 316, 361, 375: n = A,T,C or G
aaatggcaacttcattgctgccactgaaccaatcctgaatttgggctcaacaggtgaaaagtaacaatatcaaacgaatactaaacagcataacaaaaagattttcagactcttggtcataaagaccgtaatccttcacattgaaatcaatgactaaacatttttgatttacccagctacctccaagcaaactgaaaactgtctagtggatcctgaagtccatagtgcctctagccgggtctttcaagtgttgcaccacaggggtgatgattgatggtaaaaacagggatcaacccttgnagatctggtggtaagntattggaaaccctctaagaacagtgcagcgtattgtggtattcanactggttgcctacngaattcaaaaccaaatgctggaatagcttgcccccaaa

SEQ ID NO: 453 - DNA, 328 bp, Homo sapiens
cggcgtgagaagccatgagcagcaaagtctctcgcgacaccctgtacgaggcggtgcgggaagtcctgcacgggaaccagcgcaagcgccgcaagttcctggagacggtggagttgcagatcagcttgaagaactatgatccccagaaggacaagcgcttctcgggcaccgtcaggcttaagtccactccccgccctaagttctctgtgtgtgtcctgggggaccagcagcactgtgacgaggctaaggccgtggatatcccccacatggacatcgaggcgctgaaaaaactcaacaagaataaaaaactggtcaagaagctggacct

SEQ ID NO: 454 - DNA, 327 bp, Homo sapiens; identical to SEQ ID NO: 350

SEQ ID NO: 455 - DNA, 456 bp, Homo sapiens
ttgttcttcgggtcgctcttgaagtccccgggcttcaggatgacgtgctggttgtcgggccgtttgatgatacagtgcgtctgttcacacttcttacagcactccccgggggcctccatgagttcgaagccagggctgcaggaggtgttgcagggcacgtgggtgcaggcgatgacgttgagcagggtgttgttgtccaccttgtccgtgcacacgcagtcctggcacttggaggaataaactggagaaccgggctggtactcagcattcccgtgaacacacacccccttggactcacaccagtagaaaggacagcaccttccaggcaccatcttgctcttcacttcgaatcccagcgggcacacggagggcttctctttgcacaggctggtgttgcacttgcagacggtaatgttgcaagcagaccttgcccgggcgggccgctcgaaagggcga

SEQ ID NO: 456 - DNA, 150 bp, Homo sapiens
aaatagtatactaatttgtcattcatttatcatattaactttcatatttcatacttaggaaattatattccaaaaaatctttctaagctcttgaaaatctatagttattcattaccaaaatgaagttgtgattttgccagacctgcccgg

SEQ ID NO: 457 - DNA, 303 bp, Homo sapiens
cctaatcgccacacaccagcaaaggcaggttatgctatagtacaagccactagcccacctctcagaacctctcatttcctttccatcgtggaaatctatcctcaaggaaataacttctcagtgttccatctgctattctactactcctcagggattattcaggccccctcccttccctacacatcaggctggaggatttgccccacccaggactggcaaattacctttactcaacatgccctgattcaggaaactaaaatacctcttagtctaaatagacactttcactgaataaagtaaagg

SEQ ID NO: 458 - DNA, 269 bp, Homo sapiens
cctaacaaaatggcatataacttaacagtagcagaccagtgttaaaaagtctggagtcaaggggaaaaggtaaaattggaacgtttccagaatctcacaaaaaaacaacaaaccaatgttctaagtgcccaacatgaacaaattaaaaccttaaataaaggtcactgttaacgcctatcctagcataaattcagcaccaagcacaatgttattttactggtttgcctttttcattctgttttttttgttttgttttgttttgttttttt

SEQ ID NO: 459 - DNA, 255 bp, Homo sapiens
ccatgacagtgaaggggctgttaggaatatcaacaccaccgaagcgcacatggatcacatatgtgcccggcttggcagctgtgtagaagatgtcataggttccatcttcattctcaatgacatcggcctcggcctcagtgccatctggggtcagaaccgtgcaggtcactttacccttcccggcagtcttggcatcaaccacaaagcctacttcttcgccagttttcacagtggaggcgattccaggacccgtgg

SEQ ID NO: 460 - DNA, 359 bp, Homo sapiens
  misc_feature 14, 329, 355: n = A,T,C or G
aaagagcagactanacttctcaaggctagcatcccattctctgtggttggatccaatcagttgattgaagccaaaggaaagaaggtcagaggccgcctctacccctggggtgttgtggaagtggagaacccagagcacaatgactttctgaagctgagaaccatgctcatcacccacatgcaggatctccaggaggtgacccaggaccttcattatgaaaacttccgttctgagagactcaagagaggcggcaggaaagtggagaatgaggacatgaataaagaccagatcttgctggaaaaagaagctgagctccgcccgcatgcaanagatgattgcaaggatgcaggcgcanatgc

SEQ ID NO: 461 - DNA, 483 bp, Homo sapiens
  misc_feature 260, 431, 473, 477: n = A,T,C or G
cgccgcttgtgctgcagccatgtctctagtgatccctgaaaagttccagcatattttgcgagtactcaacaccaacgtcgatgggcggcggaaaatagcctttgccatcactgccattaagggtgtgggccgaagatatgctcatgtggtgttgaggaaagcagacattgacctcaccaagagggcgggagaactcactgaggatgaggtggaacgtgtgatcaccattatgcagaatccacgccagtacaagatcccanactggttcttgaacagacagaaggatgtaaaggatggaaaatacagccaggtcctagccaatggtctggacaacaagctccgtgaagacctggagcgactgaagaagattcgggcccatagagggctgcgtcacttctggggccttcgtgtcccgaggccagcacacccanaccactggcccccgtggccgcacccgtggggtggtgtccaanaaanaaataa

SEQ ID NO: 462 - DNA, 307 bp, Homo sapiens
ccataatacttgctgtccaacaaaatcacagctgttaatatgcaattgcttgcaacaattagctaaacagcattatttgacaaattcccttgaaagagacatagatgctatttaagtgtctagcacactgaatcaagtaactatcagttaggctggggccgcagctggagggaggagagaagtttacaaatccttgtccacagaaggtgtttcacacccagccttaagtttttgaaaaacacacatttgtcctgatcctacaagttcatcatccctgttttcaggaagaactgaactgtggaactgg

SEQ ID NO: 463 - DNA, 378 bp, Homo sapiens
aaagaggaagatggaacagggatgtgagtgtctatggtttcacccctgcctcttcctggtctgcccccttcactatagatggagtgcctgaaactgatcgcctcctccagattcacagacaagagggtgggctacctgggggccatgcttctattggatgagaggcacggtgcccacctgctcattaccaacagcatcaagaagtgagagggttctggcaatcacttggaatcagggagatgggagagtagggaccttggaaatcccaggggactgcctgttgtgggtattgaaaaggactgattttctcagaggtttgactgaccgtcctcccaaaccctgcagtgacctgagccaggggattcagccagtacaagg

SEQ ID NO: 464 - DNA, 566 bp, Homo sapiens
  misc_feature 530, 543: n = A,T,C or G
cctcttgatgttgactgtaaacgcctaagccccgatcggtgcaagtgtaaaaaggtgaagccaactttggcaacgtatctcagcaaaaactacagctatgttattcatgccaaaataaaagctgtgcagaggagtggctgcaatgaggtcacaacggtggtggatgtaaaagagatcttcaagtcctcatcacccatccctcgaactcaagtcccgctcattacaaattcttcttgccagtgtccacacatcctgccccatcaagatgttctcatcatgtgttacgagtggcgttcaaggatgatgcttcttgaaaattgcttagttgaaaaatggagagatcagcttagtaaaagatccatacagtgggaagagaggctgcaggaacagcggagaacagttcaggacaagaagaaaacagcccgggcgcaccagtcgtaggtaatccccccaaaccaaaagggaaagcctcctgctcccaaaccagccagtcccaagaaagaacattaaaacttaggagtgcccagaangagaacaaacccnaaaaagagtgggagcttaactac

SEQ ID NO: 465 - DNA, 557 bp, Homo sapiens
  misc_feature 538, 551, 557: n = A,T,C or G
ccaggatggtctcgatctcttgacctcatgatccgcctgcctcagcctcccaaagtgctggaattacaggcatgagccaccacacctagcccaatctcagtttcttaaatccgaacttgttaagatatttgaataaaattgatcacaagaatagctatgccttgccaaaatacataattagaatgttaaatgtaggtgaaaaagctttcgactaaactaaacttgaatatcacctggtcaaccactttcaactcattttttaactcttaagagataatttttgttattttgtcttatgactacttttgttttatttaatagcatgaatacaactttgtctgagagccccttcaagtgtgatcctgatgctgccagagccattgtggatgctttaccaccaccctgtgaatctgcctgcacagtaccaacagacgtggataagtggttccatcccagaaaaactaatgagatttctctggaatacaagctgatattgctacatcgcggtcatctggatgtattagaattaaaaggtagnagcttttcaaaanctttcn

SEQ ID NO: 466 - DNA, 557 bp, Homo sapiens
  misc_feature 251, 431, 480, 542, 556, 557: n = A,T,C or G
cctgaggtctcagaagagcgatgagaggcagggtgtgtgcattggcctaagtgagatcatgaagtccaccagccgggatgccgtgctgtatttctctgaatccctcgtgcccacggcaaggaaggctttgtgtgacccactggaggaggtcagagaggcggcagccaagactttcgagcagctgcattccaccatcggccaccaggctctggaggacattctcccatttttactaaagcagctggatgacnaggaggtgtcagagtttgccttggatggtctgaagcaagtcatggctattaagagtcgtgtggtgctgccctaccttgtgcccaagctgacaacgccacctgtcaacacccgggtgctggctttcctttcgtcagtggctggtgatgccctcacccgtcatcttggcgtgatcctcccancggtcatgctggcccctgaaggaaaagcttgggaccccagatgagcagntggagatggacctgcccgggcggccaagggcgaatttcaccccactggcgggccgttactantggatcccaactcnn

SEQ ID NO: 467 - DNA, 327 bp, Homo sapiens
aaatacctcaaaaacaggacatcatgacaacttcagtaaagtagattccatgagggtctgatacctgcaggttgtccgtctgatgacatacttgaccttgaaaaatctggggtcattttgtttttcattcttcagcagttaagatagcggaacgccgaaaggaaggagcgtagttggctgtatttcatgtttaagttttgcttttgaataaaatgtgaatttcctatgcccatctcattgagctttctcagtcattgttgctgtcatttgaaatgactccctcaaaacctagttttattagccagctgcctctgctgtagtacatgg

SEQ ID NO: 468 - DNA, 555 bp, Homo sapiens
  misc_feature 328, 378, 422, 428, 497, 499, 539, 544: n = A,T,C or G
aaatatggagttctttcagtggagagtaaaggtgctcctcctctgtgtctggtttacacggctccgcgagaccaaagggcccctcggtctccttgagcagcctggcactctgcacagaggatccaggaacggtgtcatggagccacattctgcacagacttgatgatgtggagggagctgcctggatcacttcagcgcatcagttgtgatgggagagccaaggcacttgagggcgggattgcgtctggccacctgttgccttccacctgaagggaagatttccccagtgctcacagtgaggataggactggaaaagcgttggtttcangaaggtgcaggttctggctcctgcccactgcgaacatgctgatgggccanggcaactctttagtctttgtgagcttcaagttttcttatctatnaatganaaccaataagactgaccccaactgttgcttgaggaatgaagctttgctttcatgtctgggatttcttanancctcattttacagataagaaactgagcttggcttcgtgcncaaanggtttgttaag

SEQ ID NO: 469 - DNA, 581 bp, Homo sapiens
  misc_feature 382, 414, 429, 444, 457, 481, 483, 493, 498, 515, 545, 547,561, 566, 567, 576, 580: n = A,T,C or G
aaatatggagttctttcagtggagagtaaaggtgctcctcctctgtgtctggtttacacggctccgcgagaccaaagggcccctcggtctccttgagcagcctggcactctgcacagaggatccaggaacggtgtcatggagccacattctgcacagacttgatgatgtggagggagctgcctggatcacttcagcgcatcagttgtgatgggagagccaaggcacttgagggcgggattgcgtctggccacctgttgccttccacctgaagggaagatttccccagtgctcacagtgaggataggactggaaaagcgttggtttcaggaaggtgcaaggttcttggctccttgcccactggcgaacatgctgatggggccnagggcaactcttttagtctttgtgagcttcangttttcttatctatnaaatgagaacccatnagactgacccccnactgttgcttgaaggaatgaatgncntttgctttcntgtcnggggattttctttagangcctcatttttacagaatgaaggaaacctnanggcttggcttcctncctcnnaaggggttngctng

SEQ ID NO: 470 - DNA, 305 bp, Homo sapiens
aaagtcaagcactagagatagtggattaatactcttttgccgtacactatatacagatgtatagtacaagtaacaatggcaaacagaatgtacagattaacttaacacaaaaacccgaacttcaaaatgaaggtgtgtggaggaaaggtgctgctgggtctccctacaactgttcatttctttgtggggcagggggtagttcctgaatggctgtggtccaatgactaatgtaaaacaaaaacagaaacaaaaaaaacaaggaactgtcatttccacgaaagcacagcggcagtgattctagcagg

SEQ ID NO: 471 - DNA, 557 bp, Homo sapiens
  misc_feature 471, 517, 545, 548: n = A,T,C or G
aaatacaaaaggcattttatatgaattataaactgaagagcttaaagatagttacaaaatacaaaagttcaacctcttacaataagctaaacgcaatgtcatttttaaaaagaaggacttagggtgtcgttttcacatatgacaatgttgcatttatgatgcagtttcaagtaccaaaacgttgaattgatgatgcagttttcatatatcgagatgttcgctcgtgcagtactgttggttaaatgacaatttatgtggattttgcatgtaatacacagtgagacacagtaattttatctaaattacagtgcagtttagttaatctattaatactgactcagtgtctgcctttaaatataaatgatatgttgaaaacttaaggaagcaaatgctacatatatgcaatataaaatagtaatgtgatgctgatgctgttaaccaaagggcagaataaataagccaaaatgcccnaaaggggtcttaattgaaatgaaaatttaattttgtttttccctcnggcgcgacccccgctaagggccgaattncancccacctgg

SEQ ID NO: 472 - DNA, 200 bp, Homo sapiens
aaatggaattgaaaggaactagccttggctagttgcagaattcacacatatggggctatggcaacagcagattctggagtctcagggtcttttctttctagataagttacagggcaattgcttttcagagtacttttacatttctattccattcttgtcagtaaagacaaggatcccataagctgatggagaaactgagg

SEQ ID NO: 473 - DNA, 535 bp, Homo sapiens
  misc_feature 311, 330, 380, 383, 417, 425, 509, 534: n = A,T,C or G
aaagaatcagcaaaatttcaaataaaaaattatgaaaatattatcctcattagttcatttagtcccatgaaattaattattttctctgctcgatcttggtggacagtttcatgaagctgtcagttagttcattaaagttttggaaattctcagacagtgcagtggtatcagaaacttgtattcaagagtacaggtcagagtcttcttttcttttctttttgagatggagtcttgctctgttgccagactggagtgcagtggtgcgatctgggctcactgcaatctccacctccgggttcaagccgattctnctgcctcagctcccgagtnactgggactacaggtgcgcccccccaagcccactcatttttgtattttantanagatggggttccgatgttggctaggatggcctcnactctggncagagtctttttgtaaatatccttggaaagaagcaatttaaactgtactgtgcaaatgctttaaggaaaaacaaaccactgcancttcctgaaatgaagaactccccang

SEQ ID NO: 474 - DNA, 559 bp, Homo sapiens
  misc_feature 475, 515, 522, 523, 532, 551: n = A,T,C or G
ccatctacaatagcatcaatggtgccatcacccagttctcttgcaacatctcccacctcagcagcctgatcgctcagctagaagagaagcagcagcagcccaccagggagctcctgcaggacattggggacacattgagcagggctgaaagaatcaggattcctgaaccttggatcacacctccagatttgcaagagaaaatccacatttttgcccaaaaatgtctattcttgacggagagtctaaagcagttcacagaaaaaatgcagtcagatatggagaaaatccaagaattaagagaggctcagttatactcagtggacgtgactctggacccagacacggcctaccccagcctgatcctctctgataatctgcggcaagtgcggtacagttacctccaacaggacctgcctgacaaccccgagaggttcaatctggttccctgtgtcttgggctctccatgcttcatcgnccgggagacattattgggaggtagaggtggggagataaangccaagnnggaccttangtgtcttgtgaagactcantggccata

SEQ ID NO: 475 - DNA, 150 bp, Homo sapiens
ccatcagaataactacaagccatactgaggcggcagcaggagcgaccaactgatcgcacacatgctttgtttggatatggagtgaacacaattatgtaccaaatttaacttggcaaactttctattgcctgtcccatgtgcatcttattt

SEQ ID NO: 476 - DNA, 323 bp, Homo sapiens
ccacagagcctcacgtgcgcatggtcacactctatgacaacgaagaggtggggtctgagagtgcacagggagcacagtcactgctgacagagctggtgctgcggcggatctcagcctcgtgccagcacccgacagccttcgaggaagccatacccaagtccttcatgatcagcgcagacatggcccatgctgtgcatcccaactacctggacaagcatgaggagaaccaccggcctttattccacaagggccccgtgatcaaggtgaacagcaagcaacgctatgcttcaaacgcggtgtcagaggccctgatccgagaggtg

SEQ ID NO: 477 - DNA, 273 bp, Homo sapiens
aaatgtctgcatgcagccagccatcaaatagtgaatggtctctctttggctggaattacaaaactcagagaaatgtgtcatcaggagaacatcataacccatgaaggataaaagccccaaatggtggtaactgataatagcactaatgctttaagatttggtcacactctcacctaggtgagcgcattgagccagtggtgctaaatgctacatactccaactgaaatgttaaggaagaagatagatccaattaaaaaaaattaaaaccaattt

SEQ ID NO: 478 - DNA, 78 bp, Homo sapiens
  misc_feature 23, 25, 34, 48, 52, 61, 72: n = A,T,C or G
tgtttttctaactgggggaaaanantcccacccnattcaaaacattgngccntgtcaaacnaatagtctatnaacccc

SEQ ID NO: 479 - DNA, 562 bp, Homo sapiens
  misc_feature 386, 431, 533, 547, 561, 562: n = A,T,C or G
aaaccacactgctcttttattcaatggaacatccccgctttagcgcagtgttgaatctaacaccgaaaaaagcccagagaaatttctgcagataaaccagtgaagagaacgcgcagtatacattattgtcaacagaatcacttcatggagagggaagcgggaggaaaaaggaaggagaatgaacaaggagctcaaacccctacacactgcaaaacattcagacatttgggattaaaacaaaacataaaaggaagccttccaggaaggagaggaccaaatggaatctgaggcagctcaggtgatcaaggagcacaggaagaactccaggctggcaggcgagcccgagggagctcaggctgcccacccactgctggcaggatcgccangacggatgggaatcccgaaacctggagatgaacctaccctcggcnactttcaagactcccttgacaagggtggcagagattaaaaaacccccccttttaccttcggccgcgaccacccttaaggggcgaattccagcacccttggcnggccgttacttagngggaaccccagctnn

SEQ ID NO: 480 - DNA, 197 bp, Homo sapiens
aaacatttgttaagaatcctttctcatgaatctctgaatatttggaatgtatttatggagtcattaaaatataattctgggaagaaaccaagaaattaacatttttattctatatggctttataaatctaggtcttctgggtcattaaggtattaagcttcagtgtctttttttttttttttttttttagcccaaaa

SEQ ID NO: 481 - DNA, 333 bp, Homo sapiens
aaatttcactatgaaagacatttttatccctgatattcaggttttgtttttctctgtcttaaagaaaaatttttgatatttgtatattggtcctaaattcagtccctttactgaattcccttattagttccagatagattataaaagccagcagttttggaatcatttttgacccctgtcattctctcataccccacactaagttctgtcaaatctaccttaaaagtatatccacattggcagccaggcacggtggctcaagcctataatcccagcactttgggagccaaggcagggggatcagttgaggccgggagctcaagaccagcctgg

SEQ ID NO: 482 - DNA, 124 bp, Homo sapiens
aaaattgggtttataaccaagattcaaaaaatacacctaaaacttggcttaaaatatgttaatattttatattctgtcataaatgttatgacatttaattgtggcaaatccatttacttttttt

SEQ ID NO: 483 - DNA, 564 bp, Homo sapiens
  misc_feature 330, 363, 366, 377, 382, 445, 462, 463, 467, 509, 510, 524,529, 555, 561: n = A,T,C or G
aaatataaggattttcctagatattgcacgggagaatatacaaatagcaaaattgaggccaagggccaagagaatatccgaactttaatttcaggaattgaatgggtttgctagaatgtgatatttgaagcatcacataaaaatgatgggacaataaattttgccataaagtcaaatttagctggaaatcctggatttttttctgttaaatctggcaaccctagtctgctagccaggatccacaagtccttgttccactgtgccttggtttctcctttatttctaagtggaaaaagtattagccaccatcttacctcacagtgatgttgngaggacatgtggaagcccctttaagtttttcantcntacataaatanttttnaagtggaacctaattaacctattaataattaatgaattaattttaagcatcaaatattgggcncgaatttgggaaaaatnnaagnatgaatccttggattggaatagttattaaaagatgttattannaaattttattttanttttngatattaaaatgaaggttttatttanaataanttc

SEQ ID NO: 484 - DNA, 327 bp, Homo sapiens
ccatgtactacagcagaggcagctggctaataaaactaggttttgagggagtcatttcaaatgacagcaacaatgactgagaaagctcaatgagatgggcataggaaattcacattttattcaaaagcaaaacttaaacatgaaatacagccaactacgctccttcctttcggcgttccgctatcttaactgctgaagaatgaaaaacaaaatgaccccagatttttcaaggtcaagtatgtcatcagacggacaacctgcaggtatcagaccctcatggaatctactttactgaagttgtcatgatgtcctgtttttgaggtattt

SEQ ID NO: 485 - DNA, 406 bp, Homo sapiens
  misc_feature 400: n = A,T,C or G
ccagcagcctctgatctgtgcagggtattaacgtgtcagggctgagtgttctgggatttctctagaggctggcaagaaccagttgttttgtcttgcgggtctgtcagggttggaaagtccaagccgtaggacccagtttcctttcttagctgatgtctttggccagaacaccgtgggctgttacttgctttgagttggaagcggtttgcatttacgcctgtaaatgtattcattcttaatttatgtaaggttttttttgtacgcaattctcgattctttgaagagatgacaacaaattttggttttctactgttatgtgagaacattaggccccagcaacacgtcattgtgtaaggaaaaataaaagtgctgccgtaaaaaaaaaaaaaaaaaaaaaacntgggcc

SEQ ID NO: 486 - DNA, 386 bp, Homo sapiens
  misc_feature 361, 374: n = A,T,C or G
tctcccactcctgcattccatctgactcaacgctgctccccggcctacctaattacccgggcttctggtttcctggaggacaaaaagcaggcggcaagtattctgggtaaaatcctcccaaagtcttcccccaccgtccccccaatgggggactatgggttactgtgatcaagagacacctgaacataaaacacaactacacttctaccaaaatcaaactcaaatccacacaacaaaacagaattgagcaatcttaccagggattgaaaactgagggtgtgagatgctgggctgagggccaggaggaggagaaggaggagagggagggaaagcacagagtgggagggagtgagggctccanggatggctgccanggccttccatgg

SEQ ID NO: 487 - DNA, 560 bp, Homo sapiens
  misc_feature 458, 466, 474, 475, 513, 552, 555, 558: n = A,T,C or G
ccaacggggccctcaaagtctccgtctggagtaaggtgctgcggagcgacgcggcctgggaggataaggatgaatttttagatgtgatctactggttccgacagatcattgctgtggtcctgggtgtcatttggggagttttgccattacgagggttcttgggaatagcaggattctgcctgatcaatgcaggagtcctgtacctctacttcagcaattacctacagattgatgaggaagaatatggtggcacgtgggagctcacgaaggaagggtttatgacctcttctgccttgttcatggtcatttggatcatcttttacactgccatccattatgactgatggtgtacagctcccaagtgctccctatccagtccaaaggaccctcttgattacagcacaggaacttgatcgttggggaaccccaccccttggaacttggaagacccctgtttnctggaccncgaatcanngtggttgggcatcaagtggttttcttccaaggggtggngaccctgaaactttttaccttccccgggcggggcccttnaanggnca

SEQ ID NO: 488 - DNA, 213 bp, Homo sapiens
ccacgatgtcatcctccagctgcacgtagtagatgcctttggactgcgcgtacatcatgaggaagcagtaatcgaggttctgtttggtcctccacctgactctctccttggggtccccaagggactctcggaggcgggagaagtcagggtagaagtggggggagggtgagatgacctccaggagcccagaatggatctccgtggggaacaagg

SEQ ID NO: 489 - DNA, 297 bp, Homo sapiens
ccacatatgcccctgtcatctctgctgagaaagcctaccatgaacagctttctgtagcagagatcaccaatgcttgctttgagccagccaaccagatggtgaaatgtgaccctcgccatggtaaatacatggcttgctgcctgttgtaccgtggtgacgtggttcccaaagatgtcaatgctgccattgccaccatcaaaaccaagcgcagcatccagtttgtggattggtgccccactggcttcaaggttggcatcaactaccagcctcccactgtggtgcctggtggagacctgg

SEQ ID NO: 490 - DNA, 347 bp, Homo sapiens
ccagagggtgtgacccagttaccctttaacccccacccttccagtcgggtgtgagggcctgaccgggtccagggcaagcagatgtcgcaagccctatttattcagtcttcactataactcttagagttgagacgctaatgttcatgactcctggccttgggatgcccaagggatttctggctcaggctgtaaaagtagctgagccatcctgcccattcctggaggtcctacaggtgaaactgcaggagctcagcatagacccagctctctgggggatggtcacctggtgatttcaatgatggcatccaggaattagctgagccaacagaccatgtggacagctttgg

SEQ ID NO: 491 - DNA, 566 bp, Homo sapiens
  misc_feature 287, 292, 293, 298, 316, 318, 342, 346, 370, 392, 422, 444,470, 472, 493, 502, 504, 524, 537, 544, 550, 553: n = A,T,C or G
aaatatggagttctttcagtggagagtaaaggtgctcctcctctgtgtctggtttacacggctccgcgagaccaaagggcccctcggtctccttgagcagcctggcactctgcacagaggatccaggaacggtgtcatggagccacattctgcacagacttgatgatgtggagggagctgcctggatcacttcagcgcatcagttgtgatgggagagccaaggcacttgagggcgggattgcgtctggccacctgtttgcttccccctgaagggaaaatttccccantgttnncagtnaggataggactggaaaancnttggtttcaggaaggtgcaggttntggntcctgcccactgcaaaacatgctnatgggccagggcaactctttantctttgtgagcttcagttttcttatctatnaatgagaacaattaagacctgnccccccactgttgcttgaggaatgangncctttgcttttcatgtctggnatttcttananccctcattttaccaaatgangaaaactggaggnttggctncctgcncanaagggttttgctc

SEQ ID NO: 492 - DNA, 561 bp, Homo sapiens
  misc_feature 410, 527, 545, 559, 561: n = A,T,C or G
cctccagggctgggcccaagcgcccgtcgacggcaccctgggcccagaggactcgcgggcctcatctccaatgattcagaactcacgtctgtcgctgctgcaaccccaagatgtcggagacacggtggaaacgcttatgttacatccggtgatcaaggctttcctgtgtggctccatcagtgggacctgctctaccctccttttccaacctctggatctccttaaaacacgcctgcaaaccctccagccctcagatcatgggtctagacgtgttgggatgttggctgtactcttgaaggtggttcgcacggagagtcttttgggcctttggaaagggatgtccccttccattgtgagatgtgtccctggcgttggaatctactttggcactctctactctttgaagcagnatttcttgcgaggccatcccccaaccgccctggagtcaagtcatgctgggggtgggctctcgctctgttgcaggggtctggtatgtcacctatcactgtaatcaagacccgctatanagtggggaaatatggctnttgagagtattctncn

SEQ ID NO: 493 - DNA, 380 bp, Homo sapiens
aaaaaagttccaacacacagccatgaggagcctcagttttgaaagaggtgcataataaaactactaaccagaggagtctatgccattttaagaaaaacaattaacctggttaaagagaaatgtcttatgtaaataataaactaattgtggcttgtaaatgatttgtatgtgatcctgtcgactaaaatcacttaacaattctacaataagcttctgcatcaaagtctgccgcttgctctatgccggaataacaccaaatggaatctcctcatctcttgcttgttagcgatgtgtctgattcagggcatctgtctttttgttactttttgtccgtgtcctctcatttgggttttgtaactgcaattttcaaaccaaagttt

SEQ ID NO: 494 - DNA, 535 bp, Homo sapiens
  misc_feature 4, 16, 485, 510: n = A,T,C or G
caanttgctgctgacnctctgggtgaagaatggaagggttatgtggtccgaatcagtggtgggaacgacaaacaaggtttccccatgaagcagggtgtcttgacccatggccgtgtccgcctgctactgagtaaggggcattcctgttacagaccaaggagaactggagaaagaaagagaaaatcagttcgtggttgcattgtggatgcaaatctgagcgttctcaacttggttattgtaaaaaaaggagagaaggatattcctggactgactgatactacagtgcctcgccgcctgggccccaaaagagctagcagaatccgcaaacttttcaatctctctaaagaagatgatgtccgccagtatgttgtaagaaagcccttaaataaagaaggtaagaaacctaggaccaaagcacccaagattcagcgtcttgttactccacgtgtcctgcacacaaacggcggcgtattgctctgaagaancagcgtaccaagaaaaataaagaanagctgcagaatatgctaacttttgg

SEQ ID NO: 495 - DNA, 523 bp, Homo sapiens
  misc_feature 461, 507, 516: n = A,T,C or G
ccacggctgcttccagctcctccctggagaagagctacgagctgcctgacggccaggtcatcaccattggcaatgagcggttccgctgccctgaggcactcttccagccttccttcctgggcatggagtcctgtggcatccacgaaactaccttcaactccatcatgaagtgtgacgtggacatccgcaaagacctgtacgccaacacagtgctgtctggcggcaccaccatgtaccctggcattgccgacaggatgcagaaggagatcactgccctggcacccagcacaatgaagatcaagatcattgctcctcctgagcgcaagtactccgtgtggatcggcggctccatcctgcctcgctgtccaccttccagcagatgtggatcagcaagcaggagtatgacgagtccggccctccatcgtcaccgcaaatgcttctaggcgggactattgacttanttgcgttacaccctttcttgacaaaaacctaacttgcgcagaaaancaaaatganaattggc

SEQ ID NO: 496 - DNA, 222 bp, Homo sapiens
cctccactacctccggggccatgtactccgccgagccgcacggagtgagcagctccggggtggagataggggagcagtccccgttgagtttgatgccgctgcccaggtcgaagtcacagatcttcacgggggagacctggttggggtgctcacagaggatgttttccggctttaggtccctgtgggcgatgcctttgttatgcagaaagtccaaggcgctgg

SEQ ID NO: 497 - DNA, 86 bp, Homo sapiens
  misc_feature 31, 38, 43, 44, 53, 56, 60, 64, 66, 77, 78, 79: n = A,T,C or G
gtacaagcttttttttttttttttttttttnggggaanttttnnttttttttnttngggntttncnaaaaaacccannncccaaaa

SEQ ID NO: 498 - DNA, 310 bp, Homo sapiens
cctgaagaggccaacatggtgccagacttggcgccctgccaggaccaaggggcatgtgcactctccagggtgctaggagcagggtcagggaggatgaggaggaaggctgagtctccctcccaggagccccacccaatgtgcaggtggagacctgcaccaggagtgctcagggcaagttccttttcaattgcttccctcgcaccaagggcactgtctatattctcaccccataagaacaaaaatgtttctgttccccttacaagtgactaccacgtcaccacccatgaagggctggtccctttatttctgg

SEQ ID NO: 499 - DNA, 403 bp, Homo sapiens
  misc_feature 396: n = A,T,C or G
ccacccacgcttaggttcccatcacactgatgactccgggtttggcgagcacaggagcgcaaaccttttcacattctttctgtgatccaaatttgttttcgtttccaccacaacctccataccagaatcttgcacagcttttggtgtttggatcatagtaccattttaatatgaaacccctgcaagttccttcgtctttcggcaacttgcatatatctgtttcagtgagagccaatggttctgtgctcaccattagattgatggttgaactagaagctgaccttgctggctgtggaggtgggggctgagatttctttgtactgaaacttccgtggtaggtggctctgacctgagacctcaggtagcagaccacagccacatggtatgtctgcccancgaagca

SEQ ID NO: 500 - DNA, 334 bp, Homo sapiens
gcggcggcgtgagttgcatgttgtgtgaggatcccggggccgccgcgtcgctcgggccccgccatggccgtcaccatcacgctcaaaacgctgcagcagcagaccttcaagatccgcatggagcctgacgagacggtgaaggtgctaaaggagaagatagaagctgagaagggtcgtgatgccttccccgtggctggacagaaactcatctatgccggcaagatcttgagtgacgatgtccctatcagggactatcgcatcgatgagaagaactttgtggtcgtcatggtgaccaagaccaaagccggccagggtacctcagcacccccagagg

SEQ ID NO: 501 - DNA, 470 bp, Homo sapiens
ccagtgagaggcactccctgcagggatttcacagcccaaatggcgggaccgtccaggggctccaagaccaacaggagcatgtggtagccacgtcacaacccaagaccatggggcatcaggacaagaaagatctatgtgggcagtgttccccgttaggctgcctcatccggatattgattgacgggatctctctcgggctcaccctgcgcctgtgggacgtgtatctggtagaaggcgaacaggcgttgatgccgataacaagaatcgcctttaaggttcagcagaagcgcctcacgaagacgtccaggtgtggcccgtgggcacgtttttgcgaccggttcgttgatacctgggccagggatgaggacactgtgctcaagcatcttagggcctctatgaagaaactaacaagaaagcagggggacctgcaacccccagccaaacccgagcaagggtcgtcggcatccagg

SEQ ID NO: 502 - DNA, 344 bp, Homo sapiens
  misc_feature 185, 200, 203, 204, 224, 225, 234, 245, 250, 251, 277, 281,286, 288, 301, 313, 318, 327, 335, 339: n = A,T,C or G
aaaaaatgattctttaatgtatttttctaaacattctgattggaagtagtggattcctaaatgattccaaagtcatctgtaattcttctgtttttgttttgttctgtcttttcttcattttggctttgggtggggggaggggcaggtgacacaaaggattttttttttttttttttaatttttgnaattttttccaaaanccnnctaaaaatttgccctgaaanncaacttgtntgccttttgcnttttnncctcggccggaacccccctaaggggnaatnccacncnctgggggccgttnctaggggatccnagctnggtcccaancttggggnaatnatggc

SEQ ID NO: 503 - DNA, 310 bp, Homo sapiens; identical to SEQ ID NO: 498

SEQ ID NO: 504 - DNA, 553 bp, Homo sapiens
  misc_feature 448: n = A,T,C or G
aaaaatatatacaactatgatgttcaaatatgtattctgagccattatgttcaaacataaatatctgggaaattcaaactgctgcaacaagttaggaaaggattaaggaaaaatgatgagctacaaattatgtagttggaggaagaaaaaaatgttacttagcatttatgtctggataggtatgtattttctaatttacatacacatatccagttgagtatagacaaccatcaaaatgtaaccagttacacagagactagactaagccaacactattttctataacaggtaacagtagtgatttcaaaaattttaatatctcaatagtttcaccaaaaattatttgtggtaatatgctaatattctgaagttttgagaggcacagattaaatgagtgcactatctatgccaaactcagcaagtctataacttactgtttaattatggngtaagtatctgaacacaatagcatagagaggcaaccagaaaaggacattttacatatgcccatgctgatcaatcacattaacatcagtgcttacactttcaaatt

SEQ ID NO: 505 - DNA, 563 bp, Homo sapiens
  misc_feature 458, 501, 531, 556: n = A,T,C or G
ccagacccgcagctcctgactcttcctaaagtcatccagccccaccacaccatctgccagctggcccagacccccatactgcagtccgcccacggtatgtccgtcataggtggagtcgttgaggtacacggcctcagataaatacattgtctgccccacaggggcggtgtaagacaggagtccatccctccagaggcagccatagagctctacccgcagacagacgctcatgacccggtcagcccgggggtagaagcgaaccagtcgggcaaccatggggggcccaaggtccttcagcaccactccctcagggtcctcattgcctgagatcacctcctgaccccagcggtccttccagcccatccagcggcgaccatcccgggagtaacgcagccggtagctccgggagaactccttgcccaggcccccggcatgccgtccctgggtgcccaccaaanccaccaggtgcagtcgttgtagatccacctgcaagtactcctnctcctttgggaaacaccgaccctgcggggnaccaaggccccattcccgttactgnttttcac

SEQ ID NO: 506 - DNA, 302 bp, Homo sapiens
aaaacggtgtgtgttcggaggggtgaaagcattaagaagcccagtgccctcctggagtgaggcaagggctcggccttaaggagctgaagagtctgggtagcttgtttagggtacaagaagcctgttctgtccagcttcagtgacacaagctgctttagctaaagtcccgcgggttccggcatggctaggctgagagcagggatctacctggcttctcagttctttggttggaaggagcaggaaatcagctcctattctccagtggagagatctggcctcagcttgggctagagatgccaagg

SEQ ID NO: 507 - DNA, 227 bp, Homo sapiens
ccagcacggtgaaggcattccgggcgaacatgaagagctgggtcaggtccttctcgtctgacagcggctggcaggtgccgaactcccagcggaccgtgtcgtaggctccctgtaggaacaagtccttgatctgtcggaacgcttcccgcacaccctgggtgcatttgggactctggccctcaaagtccgccgtgacgtcccggaagaactggttggagtcgccgagg

SEQ ID NO: 508 - DNA, 300 bp, Homo sapiens
aaacaagatttgctgcatttccggcaatgccctgtgcatgccatggtccctagacacctcagttcattgtggtccttgcggcttctctctctagcagcacctcctgtcccttgaccttaactctgatggttcttcacctcctgccagcaaccccaaacccaagtgccttcagaggataaatatcaatggaactcagagatgaacatctaacccactagaggaaaccagtttggtgatatatgagactttatgtggagtgaaaattgggcatgccattacattgctttttcttgtttgttt

SEQ ID NO: 509 - DNA, 511 bp, Homo sapiens
  misc_feature 436: n = A,T,C or G
cctgccgtgccccgttttgtgggcctgtacttgaaacactgaacgtgatgtgtccttcactcacccgcagcactttaatccccacaacagccctgtgaggtaggaatcaccaccattccccccgactcatattacagatggggaaaccgagacacacattcaacaaagcgcgcatcacatggggagttcagggttagcctggagtacgaacacacgttctccccatggcccagtcagcggcccacctggcctcttcccctccctttagtaaccccatcagcagcagcataaaaatctaacccttcattttgctgaaagcccctgcagatgacagtttccttcctatcatgtctgcagagctccaaggctgggggcgatgttgaggccgaagccagccacagtgcctcagctgtgcctttcctggagagcgggtggncgcccccagcacatccctggcacacgggcttgcataacaaaactcttgtaccgccatctctacacaagaccatgg

SEQ ID NO: 510 - DNA, 397 bp, Homo sapiens
cctggtgaccttgaagcatgtgtatgagattgcccgcatcaaagctcaggatgaggcatttgccctgcaggatgtacccctgtcgtctgttgtccgctccatcatcgggtctgcccgttctctgggcattcgcgtggtgaaggacctcagttcagaagagcttgcagctttccagaaggaacgagccatcttcctggctgctcagaaggaggcagatttggctgcccaagaagaagctgccaagaagtgacccttgccccgccaactcccagatttcaaaggaggtagttgcaaaagctgtgcccaaggggaggaaggaggtcacaccaatatgatgatggttttcatgactttgaatgatatatttttgtacatctagctgtatcgaggcatcagg

SEQ ID NO: 511 - DNA, 205 bp, Homo sapiens
aaaatatttaagttaaaactacttgaatagtattttgctgaagagcaagatatgcattaatcaccggttttatactgtccaaaatgaagcatccccgtgacaaaccagagtgggcagaagcatcgagagcgtgacaggaaatcccaagactgcttccgcctcagaggcgtcccggctgcgattcgctgccctgttgtcagtgagg

SEQ ID NO: 512 - DNA, 496 bp, Homo sapiens
  misc_feature 304, 310, 319, 322, 337, 341, 358, 372, 381, 382, 401, 416,428, 455, 477: n = A,T,C or G
tcccagctggtgctgaagctcgtcagttcaccatccgccctcggcttccgcggggcgctgggccgccagcctcggcaccgtccttttctttctccctcgcgttaggcaggtgacagcagggacatgtctcgggagatgcaggatgtagacctcgctgaggtgaagcctttggtggagaaaggggagaccatcaccggcctcctgcaagagtttgatgtccaggagcaggacatcgagactttacatggctctgttcacgtcacgcttgtgtgggactcccaagggaaaccgggctgttattctnacctancatgacatnggnttaaacacaaaactngttnaacccctttttatttcnaggacatgcggganatacccacnntttcctttgcccgtggacnccctgacttggccgnaacacctaaggngaattcacacactggggccgtactagnggatccactcggaccaacttgngtaatatggcatagtgttt

SEQ ID NO: 513 - DNA, 630 bp, Homo sapiens
  misc_feature 14, 289, 291, 306, 322, 331, 333, 345, 346, 355, 371, 392,402, 433, 456, 479, 513, 533, 551, 586, 605: n = A,T,C or G
tccaccatccaaangggcagtcagatggaatggaagaatacaaaacctttggtctaggacttactaatgttaaaaaaaataggtgacagggaacaggttaagaaaactatgtaaatgtaggaaagatgggaggaaataaagccctgttctggatcccccatcccctccagaataagagcatgttctgcatgtattaatcttttatgctgtttatgaaacaggcaagataagtctgtttttccttctggaaccataagggtaaccagattttcatctaccgacaagtggnangcatttgtgtttatnatgccacttactttcnaacacccananatttattggtgnnaccttggtngcaaaacccattactngggaatttttaaaaattttgncccccccccntccttccttcctttttttttttccccttccnttccaaaccttgtgtgcccaagngacagcttttttttttatatacntggggaattcattaaaaattgcccttagtaaatntttttagaatattccaaatnttgtggggttttaaaatnaacctttccccccccccccccccccccctttgtantttttacctttgggccggnacccccttaggggcgaaattcccac

SEQ ID NO: 514 - DNA, 214 bp, Homo sapiens
tccgggcaacctatgggtaccaccgggttctcgcgggtcttgcgaacgaacttttccttgaaactctctggattcctgtaaacagtggggctcagcccctcaatgactggaggcttcgatggttcaaaggggacctccggaatcacagggccgggagtcgccatgtccgggccacagcagcaggagaaaatcgggactccgacctcagcctccc

SEQ ID NO: 515 - DNA, 196 bp, Homo sapiens
  misc_feature 9, 14, 42, 47, 55, 66: n = A,T,C or G
ttgtggggnatacnaacactcccacgtctgcggggaaggggngcttnatcgttgngcttgccctgnttgccctcaatggactcgatgagcgctgtctcctctccacagatgtaggccccagccccgcgcaccacaaacacgtcaaaatcatagccagagccacaagcattcttgccaatcagacctgcctcatagg

SEQ ID NO: 516 - DNA, 516 bp, Homo sapiens
  misc_feature 15, 16, 270, 280, 319, 326, 334, 350, 351, 352, 367, 374,392, 440, 447, 449, 458, 469, 485, 497: n = A,T,C or G
ccatgttctataccnnaaagtgaggctggcaggtacagagatgaactgtacacatgtgatacatttaagccactggaaaaacccctgtgcttgaaaatatttcctctatatcatgcctggagttccatcatagcccttcatttccttggctttagcatttaccttctcttaagaataccagctttcccctttccctgagaggaagagcacatgttggtctcctcttagtgtgaacgagattgccaggcccttttctcctatgcacaccangatagacaangcaggggatactggcagcctgcattatcctccattgggnttacaantgggcctncctttcttccccttgnnngttgggcccaccctngaaaatngggtttcgcccctccctntactgccgggttctccaggggtggctaaatcaaaaaaccccttcctgnttactananttgggcagnatttgacatgntgataccccttgcttnttggatggcacnttcctggcactctggggta

SEQ ID NO: 517 - DNA, 338 bp, Homo sapiens
  misc_feature 329: n = A,T,C or G
cctaacaaccagtaagataattttagacaattctattgaaagttattcaaaaggcatcaagtcaaaataacgaaactgccccagtaaaaaggggctgggcctgggggccaggaaaggcaagcatgagggcccagtagaggtggacctgtccctatggtaactgagctcggctttaaggccaggcattggggatcagctgctaggagcccacctgtgttcttcctgaggggtgggggcaccctagtcactgcctagagcacatggtcccccaccagcctacagcatggaaacacccaatgttgctctacctttttaacccaacttggatnggaattgga

SEQ ID NO: 518 - DNA, 378 bp, Homo sapiens
  misc_feature 17, 321, 331, 336, 337, 344, 350, 354, 357, 360, 365: n = A,T,C or G
gtgttagccaggatggnctccatctcctgatcttgtgatccacccacctcggcctcccaaagtgcttggattgcaggcgtgagccaccgagcccagcctcattaatgtgctttggaccttactagtgagacccacattttgccaccatccacttcatgttgacaggagccctggtctctgtcagccttatgtgtttatgctggagcctttcacttggttctgagtgatttgccaaagcatacagtttccacgtttggagatttacctgcccgggcgggcgctccaaagggcgaattcagcacactggcgggcggtactaangggatccaantcggnnccaaatntggggnaaanagnganataanttgttccggggga

SEQ ID NO: 519 - DNA, 319 bp, Homo sapiens
  misc_feature 13, 290, 301, 303: n = A,T,C or G
aaatgttatgacngcatactcccaagaagaaccttttcttcagttaagttaattatacatttcaataaaataaaggataatggattagtggaagttagcttgtgaatttttcttaaaaataaaactccaactctattaatccatgccagttaaacactataactaaaatttccaaataagcgcaaaaggagatgaagcagttagttacctttttgcttgaacagtccaaaggaaaatggttactataaatacagcaggcaaactggtagactgacctagaacatagtgtnctaaatttcantntcaaagtggggctaaa

SEQ ID NO: 520 - DNA, 326 bp, Homo sapiens
  misc_feature 265, 280, 317, 322: n = A,T,C or G
cctgacttctgctggcatcaagaggtgggagggccctccgaccacttccaggggaacctgccatgccaggaacctgtcctaaggaaccttccttcctgcttgagttcccagatggctggaaggggtccagcctcgttggaagaggaacagcactggggagtctttgtggattctgaggccctgcccaatgagactctagggtccagtggatgccacagcccagcttggccctttccttccagatcctgggtactgaaagccttanggaagctggcctganaggggaacggcctaagggagtgtctaagaacaaaacnacccnttca

SEQ ID NO: 521 - DNA, 509 bp, Homo sapiens
  misc_feature 312, 325, 338, 351, 357, 360, 414, 436, 453, 463, 480, 486: n = A,T,C or G
aaaccaaattgagattaaattgaagaaaagcaagcaaattaatttcagcttgattatcaacctgtatcaagaacaaaaatgggaggaggtgtccacatttatggtgtgtataggtaacatggggaaaatgctattctgtgttttggaaaagaagaaatagtgccgtcctatttatttctatatttagaaatttttctcaaagaaatttcaattgtatctatgagatgggtttctaagtatcttattgtgtgttataagtgccttttaatatcatactaagtgtgagcttctggacattttcaagagcttacnaaaactaagtggnatttggttttttnacccccctggaanacctanttnaaaaggaaaggccctccaattttatttggcatgcttcaaccataaagacatttntggtttcctcggccgcgacccnctaagggcgaattccanccactgcggncgtactagtggatccgnctcggnccaacttgcgtaatcatggcata

SEQ ID NO: 522 - DNA, 343 bp, Homo sapiens
  misc_feature 318, 329: n = A,T,C or G
cagggctgctccccagcccctcctttgactccaaacccccgaccactttgctggggctgatccctgctccatccatggtaccagccactgacaccaaggcacctccaacccttcaggcagagacgactaccaaaccccaagccacatctgccccgtcccccgcccccaagcaaagcttcctgtttggaacacagaacacctcaccttccagccctgccgcccctgctgcatcttcagcatctcccatgttcaagcccattttcacggctccacccaagagtgagaaggaaggacctcggccgcgaacacccttaaggngaaattcaacncaccttgggggcgg

SEQ ID NO: 523 - DNA, 369 bp, Homo sapiens
  misc_feature 311, 325, 332, 336, 349, 358: n = A,T,C or G
ccagtctcaggagatgaacacactcttccgcttctggtccttcttcctccgagatcacttcaacaaaaagatgtatgaggagttcaagcagctggctctggaggacgccaaagaaggctacagatatggtttggagtgcctttttcgatactacagttatggcctggaaaagaagttccggctggacatattcaaggattttcaggaggaaacggtgaaggactatgaagctggtaagagccagagttggatctgagtgaggacctcggccgcgaccacgctaagggcgaattccacacactggcgggcgntctaatggatccanctcgganccancttgggggaaaantgggcatantgttccctggg

SEQ ID NO: 524 - DNA, 353 bp, Homo sapiens
  misc_feature 14, 314, 326, 327, 335, 349: n = A,T,C or G
ccagttgcttcttngttcacaagatctgactttatgacgtgtagggtgtagaatcctgtgtcattctggatgatgttctggatcagcagggatgcattggggtatattatctctcgaccactgtatgcgggccctggggtagcttgttgagttcctattacatatcctataatttgacggttgccatccactctttcacctttgtaccagctgtagccaaaaagatgctggggcagattgtggacaagtagaagcacctccttcccctctgcgacattgaacggcgtggattcaataatgagcttggcagtggngggcggggttcnnaaaggtanaaatgaaggtgggnaccg

SEQ ID NO: 525 - DNA, 272 bp, Homo sapiens
  misc_feature 14, 190, 201, 213, 217, 237, 238, 248, 254, 265: n = A,T,C or G
agccacatggatgntcacacactcacacctttgcacacacacacaagctggctcacagacacactgggggcccagatcctggtcattccccacaggtcttaataaaggttcatggaaggaaacctgtttcctaaggtagggtgggagtgtgtgtgagtgtgtgggggggagagggtgagagtgagtgtgngcgtgtgttantgtgtgtgtgtntgtnaggagcaggagtgactgggnnctgagtttanggagtngggaagagganggagaga

SEQ ID NO: 526 - DNA, 653 bp, Homo sapiens
  misc_feature 265, 270, 272, 295, 321, 330, 337, 364, 367, 373, 385, 410,423, 436, 454, 469, 482, 519, 520, 532, 549, 575, 577, 584,607, 614, 621, 627, 634, 641, 644, 646: n = A,T,C or G
ccatcgacaccgaggaacgcctcaaaggggtcattgacctcatttttgagaaggccatttcagagcccaacttctctgtggcctatgccaacatgtgccgctgcctcatggcgctgaaagtgcccactacggaaaagccaacagtgactgtgaacttccgaaagctgttgttgaatcgatgtcagaaggagtttgagaaagacaaagatgatgatgaggtttttgagaagaagcaaaaagagatggatgaagctgctccgcagangaacnangacgcctgaaggaagactggaanagctttggacataccccggggggctnttttggganatttaantttttgggaaagttgttcaacctgaanaanttacanaggcaataatcntgacttgtggggcaaactgcttaanaaccatgatgaanaagtcccttgagngcctttgtcgtctgctcncccccattggcaaanaacctggactttnaaaaaagccaacccccaatggatcaatttttcacccnnatggaaaaaatntttaagaaaaaaaactnttccccttccctttttcttcaggaantnttgattncaaggacaattggggccccccangggatangggccanaccttncccatcntaggggntgnangaaaaat

SEQ ID NO: 527 - DNA, 223 bp, Homo sapiens
cctcccacgaagggcgaagatggccgagatgatcctaaaaataaccgaagaaagagaggaccaaccagaattccctttggacatttgtgtttttttgtttttttattttgttttgttttttcttcttcttcttcttccttaaagacatttaagctaaaggcaactcgtacccaaatttccaagacacaaacatgacctatccaagcgcattacccacttgtgg

SEQ ID NO: 528 - DNA, 404 bp, Homo sapiens
  misc_feature 287, 307, 326, 341, 343, 349, 362, 363, 370, 376: n = A,T,C or G
cgaggtaaaacggtgtgtgttcggaggggtgaaagcattaagaagcccagtgccctcctggagtgagacaagggctcggccttaaggagctgaagagtctgggtagcttgtttagggtacaagaagcctgttctgtccagcttcagtgacacaagctgctttagctaaagtcccgcgggttccggcatggctaggctgagagcagggatctacctggcttctcagttctttggttggaaggagcaggaaatcagctcctattctccaatggagagatctggcctcancttgggctagagatgccaangacctgcccgccggccctntaaaggggaaattcnancacctnggggccttccttnngatccgnctcggnccaacttggcgtaatatggcatactgtt

SEQ ID NO: 529 - DNA, 357 bp, Homo sapiens
  misc_feature 15, 18, 301, 315, 318, 326, 341, 346: n = A,T,C or G
aaaacttacttcaanggntaatttagactcagtaggtaagcaacattcagaatatgaatatgggaatgacttgagtttgagtacagatattcgacaccaaaaaagtcatactacaatgaattcctatgaatgttatcaatgtgggaaagccttctgccgaagttcatcccttattcgacatcagatcattcacacaggagagaaaccctataaatgcagtgaatgtgggagattcttcaaccgacgtacaaaccttactaagcatcaaaaacttcatgctgaagcaaaggacctgccccgncgggcgctccaaanggngaatttcngccccctgggggggnggtcnttaggggaacc

SEQ ID NO: 530 - DNA, 179 bp, Homo sapiens
  misc_feature 22: n = A,T,C or G
cgaggtccagattcctcctctnaagaagcccctgggagcacagctcatcaccatggactggacctggtggttcctctttgtggtggcagcagctacaggtgtcgagtcccaggtgcagttggtgcagtctggggctgaagtgaagaagcctgggtcctcggtgaaggtctcctgcaagg

SEQ ID NO: 531 - DNA, 288 bp, Homo sapiens
  misc_feature 279: n = A,T,C or G
aaaaaaaatttacttaaaagaaaaatggaaaaataaaactttcaacactagactgccgccctgttaagaatgtctaatatgcaaagtattggaaagcaggcatttttaccaaagagcaatgtcactataacttatgaacagaaagttgtgaaatataagggtactcatggaaaccagtgaagagaggaaacaccggcaattgttcaacacggaacagtgagcaggtactttgggagtaaggctctgagagatggaagacgctggtctcagatctgaggngatgtctgg

SEQ ID NO: 532 - DNA, 320 bp, Homo sapiens
  misc_feature 14, 312: n = A,T,C or G
ccagaagctgaacnttattcacagtgaaatcagtaatttagcccggctttgaggtggaggccataatcaatcctaccaatgctgacattgaccttaaagatgacctaggaaacacgctggagaagaaaggtggcaaggagtttgtggaagctgtcctggaactccggaaaaagaacgggcccttggaagtagctggagctgctgtcagcgcaggccatggcctgcctgccaagtttgtgatccactgtaatagtccagtttggggtgcagacaagtgtgaagaacttctggaaaagacagtgaaaaactgcntggccttg

SEQ ID NO: 533 - DNA, 578 bp, Homo sapiens
  misc_feature 334, 338, 339, 346, 349, 357, 359, 362, 454, 483, 505, 517,536, 537, 554, 563, 572: n = A,T,C or G
ccagcttcctcctgagcaaggagaaccagcctgaaaacagccagacgcccaccaagaaggaacatcagaaagcctgggctttgaacctgaacggttttgatgtagaggaagccaagatccttcggctcagtggaaaaccacaaaatgcgccagagggttatcagaacagactgaaagtactctacagccaaaaggccactcctggctccagccggaagacctgccgttacattccttccctgccagaccgtatcctggatgcgcctgaaatccgaaatgactattacctgaaccttgtggattggagttctgggaatgtcttggccggggactngaannaagtgtnccntggggagngnaantttgggacatcctgagcttttgaaatggacacctggggaatttatctctgggctgataaaaaggaactcttgctgggcaccacatgtgagtnacttggatggagacaaacggttcaattangccttccatggtctactgacantttctgcatgtnctttgactccgcgcgtagnnatcccattggcgtctangtcactggncactgcaantggatg

SEQ ID NO: 534 - DNA, 457 bp, Homo sapiens
  misc_feature 14, 15, 225, 257, 307, 330, 334, 339, 357, 367, 386, 387,394, 418, 432, 438: n = A,T,C or G
taaaattccaaatnntaaatcacttcttgtaggagggttttcattaactgcagtatatacagttcactacatatgggttgtttgagttttttgtgtgctgtatttctttctgttttttaatacctggttttgtacatatctaactctgttctcttttggttgttcagaaactggatttttttttcttaagcagtgcttaatttgtgttttttaattttgattcanaagtagtcccagctcataggtgttcatactgntacatccaaaacatttgtcaggctctctgtcagctttcatgtcatatggnatagaaaccatggaggtaggccntccnggatnttttttttagaaaaaaancggtttcccntggccgaaccccttagggnnaatccanccctgggggcgttccaggggaccnactcggaccaactngcgaancatggcatactgttccggg

SEQ ID NO: 535 - DNA, 394 bp, Homo sapiens
  misc_feature 324, 350, 354, 367: n = A,T,C or G
cctcagcatcaaagggaagactaccatgccggggatgaagcgagactgcgggggtgctgcggccgtcctgggggccttcagagccgcaatcaagcagggtttcaaagacaacctccacgctgtgttctgcttggctgagaactcggtggggcccaatgcgacaaggccagatgacatccacctgctgtactcagggaagacggtggaaatcaacaacacggatgcccgagggcaggctggtgctggcagatggcgtgtcctatgcttgcaaagacctgggggccgacatcattctggacatggacctttggcccaaccccttanggggaattccacacttggggccgtantagngatccaactcggnccaacttgggtaatatggcatactgtt

SEQ ID NO: 536 - DNA, 324 bp, Homo sapiens
  misc_feature 284, 287, 296, 303, 308: n = A,T,C or G
cctaggcacagaggagcaggttagggcacattcaccttctcaggattctgtggctccctcattggagaagggagagagcatcttgggggcgcaattccaagagcagcgagggcagaggttagagatggctgagagcccctaacctgaggcggcaccacaataggcagcaacaactgtgtggaaagctggatgaactggtcagtagcggaaaatgggagggggcactgggttggcctcttggggaggggtccaaccttgcttggatgagctcatgagaatcccantgntccaaacanagggggnagaanccaaagcccctttttt

SEQ ID NO: 537 - DNA, 314 bp, Homo sapiens
  misc_feature 297: n = A,T,C or G
tcccagctggtgctgaagctcgtcagttcaccatccgccctcggcttccgcggggcgctgggccgccagcctcggcaccgtccttttctttctccctcgcgttaggcaggtgacagcagggacatgtctcgggagatgcaggatgtagacctcgctgaggtgaagcctttggtggagaaaggggagaccatcaccggcctcctgcaagagtttgatgtccaggagcaggacatcgagactttacatggctctgttcacgtcacgctgtgtgggactcccaagggaaaccgggctgtnattctcacctaccatga

SEQ ID NO: 538 - DNA, 160 bp, Homo sapiens
  misc_feature 12, 15: n = A,T,C or G
ccaggagccggngcnaattcatgctgattgctcagatggaggaagatgcccttgtctcgaaagctcttacagaaggccatgtccgggtctgtgtcactgcccgagaacacatccctctggggcagctccatccgcagggtatcaccccggatcacatagg

SEQ ID NO: 539 - DNA, 401 bp, Homo sapiens
  misc_feature 24, 287, 309, 327, 345, 352, 354, 365, 373, 378, 389: n = A,T,C or G
cgaggtcctatgctgggcaagggnccttattttcatatccagaagttagtcagagcttggcaaataagacttctctatataataatgcctggcccaatgtcccctgtaacatcttacatgcaggacgtagggccaattctttcataacccacaggcaactgtgagtgtcctttctcaaatagtgaaggtaggtattaaagcacctttggtgggacagatgcacaggtgttgcctctgaattggtgttgaggaagtaggcataaaacctccacagaactgtgtttggnacctgaacactttacctgcccnggcggccctcgaaagggngaaattccacacacttgngggcgtncnaaggggatccnacctgggncccancttggggaatnatggcatactgt

SEQ ID NO: 540 - DNA, 328 bp, Homo sapiens
  misc_feature 277, 293, 299, 313: n = A,T,C or G
ccatggtcttgtgctagagatggcggtacaagagtctgttatgcaagcccgtgtgccagggatgtgctgggggcggccacccgctctccaggaaaggcacagctgaggcactgtggctggcttcggcctcaacatcgcccccagccttggagctctgcagacatgataggaaggaaactgtcatctgcaggggctttcagcgaaatgaagggttagatttttatgctgctgctgatggggttactaaagggaggggaagagccaagtgggcccgctnactgggccatgggganaacctntgttctactccagnttaacccttaatccc

SEQ ID NO: 541 - DNA, 615 bp, Homo sapiens
  misc_feature 14, 300, 304, 306, 313, 318, 326, 330, 335, 341, 369, 371,377, 384, 436, 474, 510, 514, 541, 550, 555, 586, 597, 600,606, 611: n = A,T,C or G
ccatctacaatagnatcaatggtgccatcacccagttctcttgcaacatctcccacctcagcagcctgatcgctcagctagaagagaagcagcagcagcccaccagggagctcctgcaggacattggggacacattgagcagggctgaaagaatcaggattcctgaaccttggatcacacctccagatttgcaagagaaaatccacatttttgcccaaaaatgtctattcttgacggagagtctaaagcagttcacagaaaaaatgcagtcagatatggagaaaatcccagaattaaaanaagntnaagtatnctcanggcaggantttnggccnaaaacnggcttccccacctgatcctttttgatantntggggnagggcgnacagtaccttcaacaggactgctgacaacccgagaggtcaatctgttcctgngcttggctctcatgttatcgccggagacatattggagnagagggggaataaccagtggcctaggggtggagatntgtnaaaagggagactaccccaatgattggnggttggggnggaanaatggttactccatatctcctcgacctccgnggtttgattantgnggtctncctgnaagg

SEQ ID NO: 542 - DNA, 448 bp, Homo sapiens
  misc_feature 13, 56, 65, 78, 88, 217, 272, 293, 309, 310, 335, 336, 353,354, 374, 379, 407, 414, 415, 420, 430, 435, 439, 444: n = A,T,C or G
tttttttttgccngggtaccaaatttctttatttgaaggaatggtacaaatcaaanaacttaagnggatgttttggtncaacttatanaaaaggtaaaggaaaccccaacatgcatgcactgccttggtgaccagggaagtcaccccacggctatggggaaattagcccgaggcttagctttcattatcactgtctcccagggtgtgcttgtcaaanagatattccgccaaccagattcgggcgctcccatcttgcgcaagttgggtcacgnggtcacccaatctttgatggntttccctgctcattcnnggaatgggggtcaaagaaaacaccnnaaaggggggattttttnnaaggggcttggccgcaaccncctanggggaattccacacctgggggcgtctanggatccnnctcgnccaacttggngaatntggnatagntgtt

SEQ ID NO: 543 - DNA, 170 bp, Homo sapiens
aaaaagatttcttgacctatgccttttcttagaaagtttgatagattagttagaacttcagatcatcagatcagtctcaaatgggtttcttggaattttatatttgacaatatttatactataccaaactcatttgcagttcttaggtttgttggttaaaacattttttt

SEQ ID NO: 544 - DNA, 572 bp, Homo sapiens
  misc_feature 299, 320, 324, 348, 351, 355, 365, 388, 389, 399, 455, 462,469, 481, 484, 490, 521, 543, 557: n = A,T,C or G
ccagtgagaggcactccctgcagggatttcacagcccaaatggcgggaccgtccaggggctccaagaccaacaggagcatgtggtagccacgtcacaacccaagaccatggggcatcaggacaagaaagatctatgtgggcagtgttccccgttaggctgcctcatccggatattgattgacgggatctctctcgggctcaccctgcgcctgtgggacgtgtatctggtagaaggcgaacaggcgttgatgcccgataacaagaatcgcctttaagggtcaacaaaagcgctcacgaanacgtccaaggtgtgggccgtnggcnccttttttcaaaccgggttttttnaancctnggcccgggantgaggaccttgtgctcaagcatnnttagggcctntttgaagaaactaacaagaaaagcagggggacctgcaaccccccacccaaccccancaagggncgtcggnattcaggacctnggncgcgancaccttagggcgaattccacacacttgcggncgttactatggatccaactcgnaccaagcttggggnaatatggcatacttg

SEQ ID NO: 545 - DNA, 70 bp, Homo sapiens
  misc_feature 11, 16, 51, 52, 59, 61, 62: n = A,T,C or G
tacaagctttnttttntttttttttttttttttttttttttttttttttannttttttntnnttttttat

SEQ ID NO: 546 - DNA, 427 bp, Homo sapiens
  misc_feature 22, 313, 343, 357, 359, 373, 385, 393, 409: n = A,T,C or G
cgaggtaaatacctcaaaaacnggacatcatgacaacttcagtaaagtagattccatgagggtctgatacctgcaggttgtccgtctgatgacatacttgaccttgaaaaatctggggtcattttgtttttcattcttcagcagttaagatagcggaacgccgaaaggaaggagcgtagttggctgtatttcatgtttaagttttgcttttgaataaaatgtgaatttcctatgcccatctcattgagctttctcagtcattgttgctgtcatttgaaatgactccctcaaaacctagttttattaccactgnctctgctgtacacatggaccttgcccgggnggccctaagggganantccaacaccctggnggcggtcctagngatccganctcggaccaacttggngaatcatggcatactgtt

SEQ ID NO: 547 - DNA, 359 bp, Homo sapiens
  misc_feature 17, 334, 352: n = A,T,C or G
aaaactacgactcagcntacattttcccacatacatttttacattgtaccttaggactcagtcatctccacttaaattgatgacacaagcagctaataaccatttctgggtttctgcctaaccccctaattgtctgttaaagccaattctctgggtgtcccagtgagtggtggctttttttctttccacattggcacattcacttctcccactcttggcatgtaagaaataagcatttacataattggaaaaatctggatttctgatgccaaagggttaaagcttcttggatttcatttcattgatatacagcccctattttatttttgtcagnggcctttgggccctgttnaggggcc

SEQ ID NO: 548 - DNA, 362 bp, Homo sapiens
  misc_feature 14, 316, 322, 330, 332, 341, 347, 351, 352: n = A,T,C or G
cctccagccatttngacattggggtggatagtcgattcacctgcctgtcagtcgattcacctgcctgtcacccagttctgtggatgtgttggtgctgagcctttgctctctttccaaatggttacagggatgttgatcagctccaccagagggagctctgatgggaggaattgctctgccatccttgtccctgtgtctcctgtcggcaggcagccattgtatctcaccagcagaccaggagactggtcccaaggttactgcaccacagggcaatttcctgccatagttaggaaggaaacacctgaactaaaatggnaaaaanaatcctgngngggtttaanaacacncccnntgcctttttg

SEQ ID NO: 549 - DNA, 318 bp, Homo sapiens
  misc_feature 10, 15, 154, 160, 210, 256, 269, 305, 306: n = A,T,C or G
cgaggtccangatcntatgcgacaacgcggacaacatcacccgggtgcagagcgacgtgttcagggtggcggagttccctcacggctacggcagctgtgacgagatccccagggtggacctccgggtgtggcaggactgctgtgaagactgtangaccanggggcagttcaatgccttttcctatcatttcccaagcagactgtctcttnagttcagctaccaggaggacaagccgaccaagaaaacaagaccacngaaaatcccactntttggagacagggggaacatttagctacagaacctnngtcttttacaca

SEQ ID NO: 550 - DNA, 555 bp, Homo sapiens
  misc_feature 318, 336, 340, 378, 383, 430, 461, 498, 502, 525, 545: n = A,T,C or G
cgaggtaaagttttattgtagactttgctgttggatacaaaatgaaggcatacaactgtcacaggcagggcagtaagtacaaagtctaagctgtaaaaaccgtttgaaaatataaactcgtttttggaatacatgtgtcaaaggctgcccatgttaatacctttggtataaaacggtaacgattcccttgacaaacccatccatcacctgacgcacattcacatctcctggtaactactctacctagtctagtctcaaccacccctgtcagtcacgactcactcctgttcctttgcaggtgcagaagacctgggaggnagggcacttagaacaccntctntatatgggttggccccaccgggttccaaaagggccgcncctgnccccacaagaccgtcccccccagcacactatccttaacaacatgacncagaccaaccaacccaaagtattatctcccnacatctcacctgtcctgtggactgccgggcggcgtcnaagngaattcacacatgcggcgtctangatccactcgaccaacttgngatatgtata

SEQ ID NO: 551 - DNA, 490 bp, Homo sapiens
  misc_feature 310, 336, 367, 373, 412, 418, 433, 440, 461, 462, 478: n = A,T,C or G
cgaggtcctgattctcgcgattattctcgaatcacctcctgtgttgtgctgggagcaggactgattgaattacggaaaatgcctgtaaagtctgagtaagaaacttcatgctggcctgtgtgatacaagagtcagcatcattaaaggaaacgtggcaggacttccatctgtgccatacttgttctgtattcgaaatgagctcaaattgattttttaatttctatgaaggatccatctttgtatatttacatgcttagaggggtgaaaattattttggaaattgagtctgaagcactctcgcacacacagngattccttcttccgttacttccgcanttgggaaaaaaacccagggaacccccggagngggggngaggacactggatatttttagttttttttttggtaacanttaaanctggcctttcccctntaagganggtttccttttttcagggaanncaattgactttttttncctcccggcgcc

SEQ ID NO: 552 - DNA, 197 bp, Homo sapiens
  misc_feature 16, 190: n = A,T,C or G
aaacatttgttaagantcctttctcatgaatctctgaatatttggaatgtatttatggagtcattaaaatataattctgggaagaaaccaagaaattaacatttttattctatatggctttataaatctaggtcttctgggtcattaaggtattaagcttcagtgtctttttttttttttttttttttancccaaaa

SEQ ID NO: 553 - DNA, 484 bp, Homo sapiens
  misc_feature 17, 285, 294, 319, 326, 333, 351, 354, 356, 363, 365, 371,373, 377, 381, 394, 398, 404, 408, 416, 431, 465, 473: n = A,T,C or G
ccatggaaggccctggnagccatccctggagccctcactccctcccactctgtgctttccctccctctcctccttctcctcctcctggccctcagcccagcatctcacaccctcagttttcaatccctggtaagattgctcaattctgttttgttgtgtggatttgagtttgattttggtagaagtgtagttgtgttttatgttcaggtgtctcttgatcacagtaacccatagtcccccattggggggacggtgggggaagactttgggaggattttacccaanaatacttgncgcctgctttttgtcttcaggaaancaaaaancccgggnaattaggtaggccggggnaancnctttatntnaaatgnantgcngagnggaagactttggncggnaacccnctanggcgaatnccgcacactggcggncgtatagtggatcgaattcggtccaacttggcgnaatatggnatagttgttcc

SEQ ID NO: 554 - DNA, 200 bp, Homo sapiens
aaagtacaaattcaggttattcatctgtttatgacacagtacacaggaggcaaagtgtttcacatcatagacttcacttccaactccttggaatgttcatttctttggcttacaggagagactagacaggaaggccaggcaatgcttaggcaactaaaatgaggttgggggtaatgctaacgtcaccctcacagggatgg

SEQ ID NO: 555 - DNA, 324 bp, Homo sapiens
  misc_feature 14, 306, 319: n = A,T,C or G
cctcaaaggatagncgccttcgaaatggctcccatattccttgagcttccaaataggctgttccaatgaccaaaagaaacagtgcactcattattcctgagatgatgatatacagagccagttcccagttaggtctgggtagggcttctgcacaggttgctaacatatggtaaggaagggatgcattcaatataaatacaaactcagagccactggttgttataaacttcagttcccgaataactctagaagctgtaaaatcaggagtaaacaatatgattatatctctagaagcattgcacttanagtaaactctttncaatt

SEQ ID NO: 556 - DNA, 349 bp, Homo sapiens
  misc_feature 324, 332, 338: n = A,T,C or G
ccaaccttatccggcgcgcccgaggtgtccccccactctgattcttgccctttccagcagctgcagctgccgtttctctctggggaggggagcccaagggctgtttctgccacttgctctcctcagagttggcttttgaaccaaagtgccctggaccaggtcagggcctacagctgtgttgtccagtacaggagccacgagccaaatgtggcatttgaatttgaattaacttagaaattcatttcctcacctgtagtggacctcggccgcgaccacgctaagggcgaattcagcacactggcgggcggtactaatggatcccancttcgganccaaantttgggggaaa

SEQ ID NO: 557 - DNA, 330 bp, Homo sapiens
  misc_feature 288, 303, 308, 316: n = A,T,C or G
cctcccccagcatgaagaaatctgcctgggcctgtttactctcatcctcactgaacctgcccaagcccagaagtgttaccgggacttagctctggtgagtcgtgatggcatgaatattgtcctgaataaaatcaaccagatacttatggagaagtacctgaagctgcaggatacctgccgtactcagttggtgtggttggtacgggaactggtgaagagtggggttctgggagccgatggtgtttgtatgacgtttatgaagcagattgcaggtggagatggtacagncaaaaatattctggnttggnagaaaaanggtctggatattct

SEQ ID NO: 558 - DNA, 314 bp, Homo sapiens
  misc_feature 268, 272, 304: n = A,T,C or G
aaatatcaaggccacttaaaacaagactcagcaaaccaaagctatcacttctgcattaccctttgtcctcaattaactactttgaaaattacagccaagcaaaccacaaacattttaatggtttatgtttggatgatatgtctcctgcacatgcttccaccagaacaaaaaaggaaaaccaaagaagttcctttccacataaggcacaggacaaaattaatcccatttacatattcaaggcgaaaatgagtgttttcctggcttttgnttgnttcttttgctatcacatgtctatagattatanggactcaagc

SEQ ID NO: 559 - DNA, 321 bp, Homo sapiens
  misc_feature 15, 254, 256, 266, 287, 289, 301, 303: n = A,T,C or G
aaaaatctacctgtncctgacttaaaacaaaaggaaagaaactacctttttataatgcacaactgttgatggtaggctgtatagtttttagtctgtgtagttaatttaatttgcagtttgtgcggcagattgctctgccaagatacttgaacactgtgttttattgtggtaattatgttttgtgattcaaacttctgtgtactgggtgatgcacccattgtgattgtggaagatagaattcaatttgaactcangntgtttatgangggaaaaaaacaagttcatanantataacctcttnantgggaatatgtcttcttg

SEQ ID NO: 560 - DNA, 235 bp, Homo sapiens
  misc_feature 202, 205, 218, 227, 229: n = A,T,C or G
aaaaaaagaattatctgtgaaccatacgtgattaataaagatttcctttaaggcagaggctggtcgagatgctgctgttatcttctgcctcagacagacagtataagtggtcttgtttctaagattcctaccaccagttactttgggccaagtatccacatccccttgcgtatgggaggtgggtgaagagtgttggatgcanagnggctattatgggnagcagctcnancgtgaa

SEQ ID NO: 561 - DNA, 330 bp, Homo sapiens
  misc_feature 280, 320, 327: n = A,T,C or G
ccacggctgcttccagctcctccctggagaagagctacgagctgcctgacggccaggtcatcaccattggcaatgagcggttccgctgccctgaggcactcttccagccttccttcctgggcatggagtcctgtggcatccacgaaactaccttcaactccatcatgaagtgtgacgtggacatccgcaaagacctgtacgccaacacagtgctgtctggcggcaccaccatgtaccctggcattgccgacaggatgcagaaggagatcactgccctggnacccacacaatgaaagatcaagatattggtccttctgagngaaagantcc

SEQ ID NO: 562 - DNA, 348 bp, Homo sapiens
  misc_feature 302, 310, 328, 342, 344: n = A,T,C or G
aaagaaaggaacttctttttgccttctaattgatcatttagactattctggctaagtctgcccacatgtaattaccggctaattcaagcgaggaaaaatgtaagtcatttagaccaaagccaagcagtttctttgcgtgggttactcaagggcttgtggttacttgtatctcctctatgtgaacttgactttgaaagacagagctctagtgtgccagcctgctaagtcctgtaagaatagggaagggcggaggggggtgggcagtgactaagggacgaaaacatggggaaaatatttcactnttaacatncaaaaaaaaagggggggnttgggggccttcantntggg

SEQ ID NO: 563 - DNA, 325 bp, Homo sapiens
  misc_feature 16, 91, 225, 228, 254, 271, 283, 292, 299, 305, 308: n = A,T,C or G
ccagttccgggtatgnccggagctgcccaagccctccatctccagcaacaactccaaacccgtggaggacaaggatgctgtggcctttttntgtgaacctgagactcaggacgcaacctacctgtggtgggtaaacaatcagagcctcccggtcagtcccaggctgcagctgtccaatggcaacaggaccctcactctattcaatgtcacaagaaatgacacagnaanctacaaatgtgaaacccagaacccantgagtgccaagcgcaangattcaatcatnctgaatgtnctctatnggcccnganggccccaccatttcccc

SEQ ID NO: 564 - DNA, 172 bp, Homo sapiens
  misc_feature 16, 86, 90, 92: n = A,T,C or G
cgcgcggtgtggtggnagcaggcgcagcccagcctcgaaatgcagaacgacgccggcgagttcgtggacctgtacgtgccgcggantttntntctagcaatcgcatcatcggtgccaaggaccacgcatccatccagatgaacgtggccgaggttgacaaggtcacaggcag

SEQ ID NO: 565 - DNA, 203 bp, Homo sapiens
  misc_feature 89, 90, 91: n = A,T,C or G
ccagcgggcccagcaatctccatgtgtacttattacagtcttatttaaccaggggtcctaaccactaacattgtgactttgcttttttnnntttcctctcctgggtactgaggtgctatgaagccaactgacaaagatgcatcacgtgtcttaggctgatgccactacccgatttgtttatttgcaatttgagccatttacct

SEQ ID NO: 566 - DNA, 510 bp, Homo sapiens
  misc_feature 12, 15, 86, 91, 255, 286, 294, 308, 315, 317, 344, 350, 353,357, 364, 366, 368, 380, 384, 395, 402, 403, 430, 450, 456,464, 466, 476: n = A,T,C or G
cctgaaaggtgnggnatgaccagggtcctgtcccccagcacatagtcaagccgggagccatagttgagatggcgggcgccagtganttttnaccagcaggtgaaggccccctcctgctttggttggaagcagcggtagctatcgatgaagggccctacatgagaggcagactggcaccccaagttactgagcaagctgtccatccacttgcgccctgggtcctcttcaaagcattccaggttgactgcatcccantggtcaatggggcggggggctgtattcaagncacccaanaaagaacacatggntggctgncnccccggaaggggttttgttcggaattncccaanaancaanaaaagcncntnttaaaaaactanccgntcaggaacttngggccgnnaaccacccttaaggggggaaattccancacactggggcgggccggtnactaanggaatccnanacttcggganccaagcttgggcgtaaatcatgggcaatagctgg

SEQ ID NO: 567 - DNA, 319 bp, Homo sapiens
  misc_feature 89, 307, 308: n = A,T,C or G
gcagaccagacaggggacagcagccttgacaaaacgttcctggaactcaagctcttctccacagaggaggacagagcagacagcagatnccatggagtctccctcggcccctccccacagatggtgcatcccctggcagaggctcctgctcacagcctcacttctaaccttctggaacccgcccaccactgccaagctcactattgaatccacgccgttcaatgtcgcagaggggaaggaggtgcttctacttgtccacaatctgccccagcatctttttggctacagctgggccaaagggaaaaannggatgggaccc

SEQ ID NO: 568 - DNA, 340 bp, Homo sapiens
  misc_feature 16, 304, 307, 310, 320, 329, 330: n = A,T,C or G
cctcattggtcggggncaaaagcgtgtactggccgttaccttcaagcatcgtgttgagccctgatgcagccacagcagcccgaagggtctcaaaggtgtcctcgatctcaatgatctgctggatgttgttggtgatggtggagatgaccttatcgatgaggtgcaccaccccgttggttgcatggtggtcggctttcagcagccgggcacagttcacagttacaatcccattaggatagtggtggatctggacgttggaattctggtacatagaggtgagggtcatgccctgtttcaactcatnagncangaatccctgncccctattnnacgggagggg

SEQ ID NO: 569 - DNA, 330 bp, Homo sapiens
  misc_feature 14, 15, 261, 271, 286, 314: n = A,T,C or G
tccattttaagggnnttcggcagagcagctccccgactccagcccgcaagccatgcccatccgcttcagcacttctatgtcatcgtggatttcaaatgtgttgtcaaaattaaacagatactcaaatttgtcattggagatgctgcagtcgatgaccgtcttcttgctggtgttgacgatgatgaagggcaggtggatgactgagttgggtggcggtggccggctggcctgctgctccgcatgccggtttctctgcaccanggtcttgaangcaatttgcttgtanaataaagttctttgaagttgagactggntctggtttaatttttt

SEQ ID NO: 570 - DNA, 371 bp, Homo sapiens
  misc_feature 32, 36, 72, 75, 77, 90, 96, 115, 118, 130, 131, 132, 145,261, 286, 307, 313, 339, 354, 362: n = A,T,C or G
cgactcggatccactagtaacggcccgccacngggntggaattcgcccttagcgtggtcgcggccgaggtanacntnttattatgctttnttgganatgaatatataaatacagnggnctatcttgcatnnnctgatgccacctntgaacatcaatggctaaaatgttctcaaacatagtgcctgaaaacaggggtagctgtacatatttcttagtaagtcttttttgttaagttttctaaaaaaaaatcccaggcctaantaatgtcaggcatttttcagacctnggatttgtaaatctctaactnccgacncgaggaaaaaggaaaaaattgatacntgaaaaatctatggntggtttgnataaccaaa

SEQ ID NO: 571 - DNA, 342 bp, Homo sapiens
  misc_feature 28, 31, 91, 113, 117, 192, 203, 230, 296: n = A,T,C or G
cagctcgatccctagtaacggccgccantgnggctggaattcgcccttagcgtggtcgcggcccgaggtccacctactactttgctgacanggacatgttctgtgctggccgngggnctgatgaggatctgaagaggacaatgatggcctgtggaggctcaatccataccagtgtgaatgctctgtcagcanatgtgctgggncgatgccaggtgtttgaagagacccanattggaggcgagaggccaatttttttactggctgccccaaggccaaacatgcaccttattctcctngcggcccgagccttatggagagcagacggtcctcctatgcatccat

SEQ ID NO: 572 - DNA, 314 bp, Homo sapiens
  misc_feature 78: n = A,T,C or G
cgagctcggatccctagtaacgccgcagtggggctggaattcgcccttagcgtggtcgcggccgaggtcctgctccanagcacggctgaccatttctgctccgggatctcaggggccgttccccaaacacactcctagctgctccagtctcagcctgggcagcttccccctgccttttgcacgtttgcatccccagcatttcctgagttataaggccacaggagtggatagctgttttcacctaaaggaaaagcccacccgaatcttgtagaaatattcaaactaataaaatcatgaatatttttatgaagttt

SEQ ID NO: 573 - DNA, 438 bp, Homo sapiens
  misc_feature 15, 37, 122, 134, 364, 418, 423, 432, 435: n = A,T,C or G
ccgagctcggatccncctagtaaccggccgccagtgngctggaattcgcccttagcgtggtcgcggccgaggtaaaataatcctattttaatcagtgcatgaaatttgcttttttgaggggnatttgaatgatnattccttccctctaaagaaatgattttggtaatgttgagaggtaccttaccacaaatcctaactgtaagtgtattcatggttattttcaaaagaattatgactcttccccaaaagaatcctaaaaaacttgtaataaacctataaagctgatttgcatatttacaaaattttgaatagcaaatataggcaactcatatatgtatataatttttacctgcccgggcgggcntcgaaagggcgaattctgcagatatccatcacactggcgggccctctagcatgntctanaagggccantcnccc

SEQ ID NO: 574 - DNA, 253 bp, Homo sapiens
  misc_feature 11, 18, 39, 40, 57, 79, 89, 98, 140, 144, 167, 188, 189,220, 223, 242, 245, 249: n = A,T,C or G
aagggtccgcnggaggtnaggtctaatgcccaatgaccnngaggagggcaacacagnttagactgcctctgcccttaantattgttatnaaccatctnaatggggttctcattagagaattattatttctataaatggtnttgnacattttttctcaaataaccacngagtatttattgattgaccanntctgtgcttgtcaacgcatttggaaaatacnaanaaaaagctttatgggatgnaantttngttt

SEQ ID NO: 575 - DNA, 248 bp, Homo sapiens
  misc_feature 30, 216, 233, 234, 239: n = A,T,C or G
cccactcggatccctagtaacggccgccantgtgctggaattcgcccttagcggccgcccgggcaggtcctcccggcgccgttaggacttgaagcaatgacatctattaaaatggggaccccagctgggggttaagaatgttgtttaagaaatgatgacgatatcttgaaaagaaattcttggctggggatggggtagggggaaacggaaaaacanatattccttacctcccnntcaantcttctctc

SEQ ID NO: 576 - DNA, 272 bp, Homo sapiens
  misc_feature 17, 115, 116, 246, 247, 251, 263, 264: n = A,T,C or G
cgagctcggatccttgnaacggccgccagtgtgctggaattcgccctttcgagcggcccgcccgggcaggtagccacatggatgctcacacactcacacctttgcacacacacannagctggctcacagacacactgggggcccagatcctggtcattccccacaggtcttaataaaggttcatggaaggaaacctgtttcctaaggtagggtgggagtgtgtgtgagtgtgtgggggggagaggnngtcncctttttcactnntactatcg

SEQ ID NO: 577 - DNA, 509 bp, Homo sapiens
  misc_feature 65, 123, 338, 376, 383, 393, 421, 424, 426, 465: n = A,T,C or G
tcctactcggatccccttagtaaccggcccgccagtgtgctggaaattcgcccttcgagacggcncgcccgggcaggtaaaaaatttttcatagaaaggagagatgttatgtgtttctcaaangggcggcattatgtaagtccaataaaaaaatctaacagaattgaatgaagacctacaaatgcttatgccaagcaggaatctgcctgccacctgtggtctcacattaattcaaaataggtgctgaattcaggattctgaaactaagtttctattcttgagctctagcaaaatgtaaggtcggtacctcactagtgaatgtcttcctgtcaaatcanaatgatatctgtacctcatctggaatgctgtcaattgncccttgngatattttgntcctttctcccactctcctgctgcaacnctngncggaccctagggaatctcaattctccctgggcgtcactnattaaggcatcccttgtagcgatacatcctgcgcgttcacccgg

SEQ ID NO: 578 - DNA, 287 bp, Homo sapiens
  misc_feature 28, 37, 84, 122, 269: n = A,T,C or G
gggaatcctgtatccactagtaacggcncgccagtgngctggaattcgcccttagcgtggtcgcggcccgaggtccttgttccncacggagatccattctgggctcctggaggtcatggggncctccccccacttctaccctgacttctcccgcctccgagagtcctttggggaccccaaggagagagtcaggtggaggaccaaacagaacctcgattactgcttcctcatgatgtacgcgcagtccaaaggcatctactacgtgcagntggaggatgacatcgtgg

SEQ ID NO: 579 - DNA, 455 bp, Homo sapiens
  misc_feature 365, 391, 413, 416, 428, 437, 442, 446, 450, 452: n = A,T,C or G
ccgagctcggatccactagtaacggcccgccagtgtgctggaattcgccctttcgagcggccgcccgggcaggtcttcgactggctgcttggggagattgagtccaagttcaaccaagccattgcgcatcccggggaaatggtgggggctctggctgcgcagtcccttggagaacctgccacccagatgaccttgaataccttccactatgctggtgtgtctgccaagaatgtgacgctgggtgtgccccgacttaaggagctcatcaacatttccaagaagccaaagactccttcgcttctgcttcctgttgggcagtcgtcgagatgtgagagaccaaggatttctgtgcgctgacatcaacntaggaagtgatgcaaccagctctctntacccacccaaacacgggggcnagnacagaaggggangtacttgantcctncttnttgncnaat

SEQ ID NO: 580 - DNA, 351 bp, Homo sapiens
  misc_feature 16, 33, 64, 80, 81, 119, 127, 130, 150, 158, 201, 284, 300,306, 333: n = A,T,C or G
ccagctcggatccctngtaacggccgccagtgngctggaattcgcccttagcgtggtcgcggcncgaggtcctccctgtnncctgggtgcccacggggctctgactttcccccgggggncagcctcntgnctgtccccggagatgctganagtgacancttgagagtttgattcttacataagcgggaagcaatgagaagncacccgcccaccacgtccctccgttcctgttggcacccccccatcctaccatctgtggcccccgtgggccctgacttgctaangcgctggcgggcatangcttgngagcactggggtacatacatggtcttntagcaccaagcccactcc

SEQ ID NO: 581 - DNA, 250 bp, Homo sapiens
  misc_feature 7, 21, 55, 69, 83, 126, 128, 141, 142, 143, 151, 160, 165,167, 179, 180, 183, 194, 201, 235, 236: n = A,T,C or G
accccgnaaccttccggaatncccacttagttaaacgggcccgcccagtgtggcntgggaaatttcgcncctttagccgtggntcgcggcccgaaggttttttttttttttttaagaaaaaaaatntnttccttaaaaaannngggggttnaaaaaaaantttcncntttccaaaaaannaancttttttttcntattttncaaaaaattgtgaaaaaaaaaaaaaattttttcnncccctttttccccc

SEQ ID NO: 582 - DNA, 115 bp, Homo sapiens
ccgagctcggatccactagtaacggcccgccagtgtgctggaattcgcccttagcgtggtcgcggccgaggtgcccttgatgtcctgcaaatgaaggaggaggatgtccttaagt

SEQ ID NO: 583 - DNA, 294 bp, Homo sapiens
  misc_feature 51, 188, 189, 194, 203, 222, 230, 239, 242, 254, 269, 283,288: n = A,T,C or G
cgaggtcacctctcggtatcagggcctctgacaccgcgtttgaagcatagnggggcttgctgttcaccttgatcacggggcccttgtggaataaaggccggtggttctcctcatgcttgtccaggtagttgggatgcacagcatgggccatgtctgcgctgatcataaggattggtaggttctgagtnngtcgncagtaatcnccccactttactatggtcnccttaacnttctgaaangancctagctatccngctaagattcattcnggctactttagcancttgntctatc

SEQ ID NO: 584 - DNA, 432 bp, Homo sapiens
  misc_feature 36, 118, 119, 121, 133, 244, 259, 291, 344, 347, 362, 367,370, 381, 387, 409, 412: n = A,T,C or G
accgagctcggatccactagtaacggccgccagtgngctggaaattcgccctttcgagcggccgcccgggcaggtcctcttcaagggcccgagccagggacagggccttggtttcctnngncctggcttctgnctcagctctgtccctctcatccgcgtatttggaagagatgtttttctcctcggctaacaactgatcaaatttcctctgcttcttttcaggttggacacgagtgcgtggtgncaataaaacaggtgncactctctaaccttctggctttcagtatatanggcgcttcctctgtgggaggttcaccttgaaccttccttcaactccggtgaantcnttctcacaacgagtnataanggntcgtttgctcncccccnctgctagtacgctccactggcnttnaacaagttcgtttaaacctg

SEQ ID NO: 585 - DNA, 568 bp, Homo sapiens
  misc_feature 3, 114, 239, 332, 384, 394, 404, 447, 452, 453, 482, 503,522, 529, 545, 551, 555: n = A,T,C or G
ccngctcgatccctagtacggccgcagtggctggaattcgccctttcgagcggccgcacgggcaggtaaaaactcacaagctctcacctagactttggagagcagtctgggggnctgtaatgtctgatactagaaactaatttgcttattttagttgtattcaagatttgaagatgtattttatagacaagttctgtttttgaactttgtggaactgttccaatcaatcaatttcccanttatgatgagtatttacattatgaatgtataacccagacatgatttgtaaagccgacagtatgtttctattcacaacactttttgatacagcngctcttgtcttcactgatactggagtctcccgttgtctgcttggtcccttcnagttcctagntacagacccnatcatactgggatttatttttaatatggatatgctatcaaacntgggnnccccttataattcccctggccctgcctcnggaaaatgggtggggaaaccngtatttaaaacagttgggncctgaanaatctggttgggttantccggncggncggccaaaatgtt

SEQ ID NO: 586 - DNA, 345 bp, Homo sapiens
  misc_feature 42, 43, 46, 204, 272, 302, 308, 311, 318, 326, 330, 331: n = A,T,C or G
cctgtctggcttgtaaaacctctcccctcacagacttggagnnggnagcagaattctggaatgttggctggcatgattgtgctttgctttgagtccacctttgtagttgcaatcaatgaagtaaacaggaaatagtccagtgttttatttaggggctaaaaaatcaccaccagcatggctggggtgaaaagcctcatcccttanggttaggcagaaagtgtaattgacttggtatacaccactcttatggggtgtgtgtctgggcttataanctaacttattttctcgcgaccctagcattnatctcntgngctactnttagcatncttnncatctatcggtatg

SEQ ID NO: 587 - DNA, 116 bp, Homo sapiens
  misc_feature 22, 25, 42, 52, 60, 71, 72, 74, 83: n = A,T,C or G
accgccaacgcccggctaatcnctncggccgcagtctgtgantggggggggncttgatgnttcggggactnncntattgattngaatggtggtagagactgccgcggcgtcacctt

SEQ ID NO: 588 - DNA, 360 bp, Homo sapiens
  misc_feature 115, 283, 292, 328: n = A,T,C or G
accggctcggatccctagtaacggccgccagtgtgctggaattcgcccttagcgtggtcgcggccgaggtccaggccctcccgagcctgtctgccctccccaggggtggaggagngtctgggccccaggaggattccctcccggagactcgcacggtgctccctgctcacgcgttgtcacagttagtccggaaatgactgaaaccaggcattctcccggacctcagcgtgggggagcctccaggcagacgctgggtatggagctgggtgtggctgcctgatgngactgccgnggcgtcaaggcaattgaaatctaatggggcgtactnttagcatgcttagcatcatatgcgctaaccgg

SEQ ID NO: 589 - DNA, 461 bp, Homo sapiens
  misc_feature 8, 11, 20, 77, 79, 256, 262, 354, 373, 376, 379, 387, 418,429, 437, 438, 451: n = A,T,C or G
tactatanggngaattagtnactgccgccagtgtgctggaattcgcccttagcgtggtcgcggccgaaggcctacananttatttcttcttggacacacccacggtgcggccacgggggccagtggtcttggtgtgctggcctcggacacgaaggccccagaagtgacgcagccctctatgggcccgaatcttcttcagtcgctccaggtcttcacggagcttgttgtccagaccattggctaagacctggtgatnttcatnctttcatctttgctggcaaacacctggattttctgcggatttctagggtacgtcctatctaaagttcgcctggagaagtgttctaccctacntttgccctatgagaggagnttnccnctagtggnttgaattattagaaaaatgtgcacgcgcgantaagattcacnatggctannttagcatcttgangtctatgttt

SEQ ID NO: 590 - DNA, 492 bp, Homo sapiens
  misc_feature 4, 9, 80, 254, 286, 289, 391, 396, 406, 417, 426, 436, 440,442, 448, 453, 457, 465, 471, 477, 480: n = A,T,C or G
tccngctcngatccctagtaacggccgccagtgtgctggaattcgcccttagcgtggtcgcggcccgaggtccaggggcnttcacgtggcagacggcaaagtgctgggtgatctcctgcatgtcctcgtagttgaagagggggttgtagcaggttttgtggttcatgccgatgtcatggtaggtgaggatgacaggccggtttcccttgggagtcccacacagcgtgacgtgaacagagccatgtaaagtctcnatgtcctgctcctggacatcaaactcttgcangangccggtgatggtctcccctttctccaccaaaggcttcacctcagcgaggtctacatcctgcatctcccgagacatgtccctgctgtccctgcctaacgcganggaanaaagaaaaangaccgtgcccnagggttggnggcccaacgncccncncgaaancccanggtngattggtnaacttnacaacnttnacacccaccttg

SEQ ID NO: 591 - DNA, 377 bp, Homo sapiens
  misc_feature 1, 114, 115, 118: n = A,T,C or G
nccagctcggatccctagtaacggccgccagtgtgctggaattcgcccttcgagcggccgcccgggcaggtaaagtacacaattgtttacctgttctgaaatgttcttaaattnnggnggatttttttcctccccaccttcaatgacttctaatttatattatccataggtttctctccctccttctccttctcacacacaactgtccatactaacaagtttggtgcatgtctgttcttctgtagggagaagctttagcttcattttactaaaaagattcctcgttattgttgttgccaaagagaaacaaaaatgattttgctttccaagcttggtttgtggcgtctccctcgcagagcccttctcgtttctttttt

SEQ ID NO: 592 - DNA, 401 bp, Homo sapiens
  misc_feature 21, 105, 106, 206, 222, 248, 257, 264, 313, 326, 332, 336,340, 350, 353, 359, 367, 371, 392: n = A,T,C or G
atccctagtaacggccgccantgtgctggaattcgccctttcgagcggccgcccgggcaggtccagatttctggggaagtcaacgtcatatcctcggagaacagnngggtggaaggacagcagctgcagcggaatcacgctcaggatgcctggaggcagtccacagtgtggggcagctcaattgcttatcgcaaacttggaacttnagtatcgtccttgganacaagataatggggcaccctggcggncgtgacttntgcaggngttctgcatttggcaacaaggatcttataataccatgatacggcatctncttgcaatcagtncagggnccgngctncagctcccancangatgcntctgagtnatgnaggtattctttaatttcaggntccttcagg

SEQ ID NO: 593 - DNA, 377 bp, Homo sapiens
  misc_feature 1, 117, 118, 375: n = A,T,C or G
nccggctcggatccctagtaacggccgccagtgtgctggaattcgccctttcgagcggccgcccgggcaggtaaaaaaatccaaatgctggcattgtccagaaaaatttaacagggnntatttataattattataaagttgaaccgctgaaacttgttcactgaaacattttaacttgcattaatgctttacgtctccgcatttatattaaaaattcacacacaaatgaaaatggaaaaactgccaatacctgatttctgtcccctatttttccactcgcaatcatatacttaggtaccttttgaccccatggaaaaaaaattctaacgttcagaactccaatacaggaagaaagaaatttttttttttttgggngg

SEQ ID NO: 594 - DNA, 310 bp, Homo sapiens
atccctagtaacggccgccagtgtgctggaattcgcccttgagcggccgcccgggcaggtccagtcacacgccgtccttgctccgtgatgtctttcacacaacagggaattttattaaccagaacctacgcacctacgtgaggagcttagccagaaatgggatggactgaacggacagttccagaagtgtgactggctaaagctcgatgtggtcacagctgtatagctgcttccagtgtagacggagccctggcatgtcaacagcgttcctagagaagacaggctggaagatagctgtgacttctatttt

SEQ ID NO: 595 - DNA, 434 bp, Homo sapiens
  misc_feature 1, 34, 130, 295, 395, 405, 408, 412, 424: n = A,T,C or G
nccagctcggatccctagtaacggccgccagtgngctggaattcgcccttggagcggccgcccgggcaggtcctgggatggctcttgggcttgagggcctgttctggcaggatgggggggcagacactgnacagggtcacttgggcggccgatatgccagcttccgactcttcagaactgaccacttgtgccgctttatggtgtagaccaggggcaccagcagagccatcatcatcaacatcttgagccccatgcgttttcgatggtcgtgctctggctcagatgcccagcgcangaaggtgcacacatccttggctatctgggacatggtagctggggtgccatcgtcaaactctaagacatctgtgtagatgggaggggccattggcaatggnctggaccttnggncgcnacccacgctaangggcgaaatt

SEQ ID NO: 596 - DNA, 740 bp, Homo sapiens
  misc_feature 1, 116, 119, 340, 377, 431, 439, 443, 451, 459, 461, 469,470, 481, 483, 486, 498, 500, 507, 512, 515, 534, 541, 577,608, 614, 628, 629, 635, 640, 647, 656, 673, 677, 688, 694,697, 706, 709, 715, 717, 720: n = A,T,C or G
nccagctcggatccctagtaacggccgccagtgtgctggaattcgcccttagcgtggtcgcggcccgaggtcctgggtggtggagcgaatgggccgattccaccggatcctggagnggnggtttgaacatcctcatccctgtgttagaccggatccgatatgtgcagagtctcaaggaaattgtcatcaacgtgcctgagcagtcggctgtgactctcgacagtgtaactctgcaaatcgatggagtcctttacctgcgcatcatggacccttacaaggcaagctacggtgtggaggaccctgagtatgccgtcacccagctagctcaaacaaccatganatcagagctcggcaaactctctctggacaaagtcttncgggaacgggagtccctgaatgccagcattgtggatgccatcaaccaagcttcntactgttngggnatcccttnctccgttntnaaaataanngatatccattntnccnccccggtgaaananctatcanatcangtngaggcacaccgcgaaaacngccacantttaaatttgagggacccaaatcggcattaatgtgnaaaaggaaaaacagcccaatctgcctccaancaaaangttaaagataatannacaganagcancatttgnaagccagcnaactaacatcaatctgntcantttccactatnaacaanttntattggcancgntgaggntncantgattcggggcgtcaggatt

SEQ ID NO: 597 - DNA, 448 bp, Homo sapiens
  misc_feature 1, 65, 125, 269, 324, 327, 336, 342, 350, 376, 386, 391,392, 400, 405, 409, 410, 415, 420, 428, 432, 434: n = A,T,C or G
nccagctcggatccctagtaacggccgccagtgtgctggaattcgcccttagcgtggtcgcggcncgaggtccagccagagtgccaaagatgcacggggatgtggtgtgtggctccgggccctcnacatctctgctttgggggatttttaccttgtctgcacacttgtcaggggagaggggacagcaaggtgggaggttgaagagctttgaggctcagcagcatgtttgtggcattcggtggacaccatggccttgggcggctggacangtttttgtgatgtgaaggacatgcatggggcacatggtaagcttggcaagggctncangaacgcttnactaanggttttangacccccacccccatgcctgtaccanggctggcctncagannaggtgaanaacanaacnncctgngggcnttttattntaangnctttggcccccctg

SEQ ID NO: 598 - DNA, 363 bp, Homo sapiens
  misc_feature 1, 180, 246, 252, 276, 298, 339, 350: n = A,T,C or G
nccggctcggatccctagtaacggccgccagtgtgctggaattcgcccttcgagcggccggctcgggcaggtccatgaagcagtcgcacagccaccaagtctcgttctcctgtctgggaggatcaaagtctgggcactcggggggcttggtgccgggcgtcggcttggagggcgtggacnatggcttggaaggcgtgggcgtcgacttggagggcgtgggtgttggggagggcgtggatgggcaanaccagntatagaactcaacgtacagctcantgagcacttgactaaataacangtgttcctatgtgccgttgtacacctctccctgtgcgatcnggtgtagtccnacacagccatatt

SEQ ID NO: 599 - DNA, 488 bp, Homo sapiens
  misc_feature 255, 313, 331, 351, 355, 388, 391, 401, 402, 429, 441, 444,447, 451, 458, 468, 473, 479, 481, 483: n = A,T,C or G
ccagtgtcttttaatttcttcttcttttccttttggcaaagcagatataaccctcagcatgctaggagagtgcacccgtacctatggaagtggtaaaatctggtatttactggcttacactcaaaacgaccacagtcctacctcagttcaaggtaaagccggatttccgtggcgggggtcccacaggacctcctgtagtagcccctgcgctgtgtgtctggagcgcggcctcggccttattgaaatggtccaagnagacagctgcttgttggattccagtgcagggaccctgcgatgtttacgtccacacccnagcccagtgtgggactgncatttttaaatgggagcggnaaantggggattggacttttaagacgggtacctaaanaanaatttttatnngtaactgaagcaacctcttttgaaaanaactgtattggnacnggnaggnggagganggcttggaanggatnaatatncntntcctt

SEQ ID NO: 600 - DNA, 259 bp, Homo sapiens
  misc_feature 185, 223, 244: n = A,T,C or G
ccaagaacgccgacatgtgagacttgcttcaccagccgccaccgcttccttacaagctcccgcactgctggagcgggctgggtaactacaggactgtgctctgtgtgataagatttggtgattccactttataagaaaggaaactgctttaattaaagcacgctaataattaaaacttcaaagtnctgcacagccacagaattttttgaagggagaaagcggncactggcctgccggcggcgtngtaaggctaatatca

SEQ ID NO: 601 - DNA, 386 bp, Homo sapiens
  misc_feature 249, 251, 314, 322, 338, 346, 352, 380, 381: n = A,T,C or G
cctcagcagcaagggttcgggctctgcaggctgggacgtcattcagatgacaccacaggagattgccgtgaacctccggcccggtgacaagaccaccttccagctacaggttcgccaggtggaggactatcctgtggacctgtactacctgatggacctctccctgtccatgaaggatgacttggacaatatccggagcctgggcaccaaactcgcggaggagatgaggaagctcaccagcaacttccngntgggatttgggtcttttgttgataaggacatctctcctttcttctacacggaccgaggtaccngaccaatnccgtcattggttacanattgtttncaaatngcgtcccttcctttgggtccgccatgtnntgttt

SEQ ID NO: 602 - DNA, 317 bp, Homo sapiens
  misc_feature 273, 296, 299: n = A,T,C or G
aaacccatcatcagagaacaagagaaagtaatttcattttacacaaaacaagattcacatgtgccaaaaaagaaagacccaaaagaaacaaaaaccaaaaccctaatgctgacactgatggtcagtaccctgaacagtggcccaaaggccactgatcaaaaataaaatagtggctgtatatcaatgaaatgaaatccaagaagctttaaccctttggcatcagaaatccagatttttcaattatgtaaatgcttatttcttacattgccaagnagtgggagaagtgaatgtgccantgnggaaaagaaaaaaaagcc

SEQ ID NO: 603 - DNA, 378 bp, Homo sapiens
  misc_feature 218, 255, 265, 270, 279, 280, 286, 295, 306, 309, 311, 318,332, 339, 344, 365, 366, 372: n = A,T,C or G
aaaagaattaaataaaaacctgagaagtctaacgtgaagctaggactcctgcctgcttcccttcaggcacctgctgtgcctccttctccgcagatgctctggttggaagcctcctgcactgccttctgtaacagcaccagctggacgttgtcatgaaatgtcacgagttctgggtgtttcctggtctgcagtccgcagctcctgcatcggccacccgnctcacatggacagcagacaaactctgaggagctccangacctaggtntctcncttttgaanngatggnacatgcctngatgtacggancangngaagggnagtccaagaggacngctcttntccangcgtgactttcatgggtgtgnnacccantccgct

SEQ ID NO: 604 - DNA, 359 bp, Homo sapiens
  misc_feature 163, 287, 288, 313, 318, 325, 329, 331, 347, 348, 351: n = A,T,C or G
aaatatataatacaattcagaatgataaagatatctacattaaggcatcaaaaagaaaaaaaaaagaaagcaaagacaggaagtctacttgcccactcagtaattaacaaagatttatgtaaaattcccacaaattgatctcagaatcagaatcagcattttntattagcaaaagctgggaaatactagtaattgtgctttatataaagctgtttgaggcaatctgcataggaaatattatcaagattcataattgcccagatctgaaggacctgcccgggcggccnntaaggccgaattcacaccctgcggncgttnctttggntccnanctcggaccactttgcnnatnttgggctt

SEQ ID NO: 605 - DNA, 222 bp, Homo sapiens
  misc_feature 130, 154: n = A,T,C or G
ccatgccctgtcccactgccctgtgccaggctgtcgggccaccagtgccctcttgagacagtctccattggctccaagggttctgtgagccacagaaggttgtgaaaggagaagacctgaagtgtggcancaccagggcagccaaagagggtgnttaaaattaacggatctcttaggggtggttgaggtggtggattgagggggaaggcgctggagttcatt

SEQ ID NO: 606 - DNA, 507 bp, Homo sapiens
  misc_feature 319, 322, 332, 338, 350, 360, 371, 375, 382, 384, 389, 392,400, 412, 417, 423, 426, 429, 433, 452, 467, 472, 478, 482,494, 495, 498: n = A,T,C or G
cctaagttattgtttgcataaaaagaatcatgttccctgtgtacatttaagaaaaagacaaaaaaacggaaatgtcagaattgtatggaaataaaacttgtttgaaaatttggaatagtgctgctgccagcttatttttctggtacttgtattttcacatgttaaatgatctttatatatgttgaattaacaaatattttgagtttctgagaaaaaacaaaacatattaatggtattgaaatgtgttagtagtctggctgtgtgcccaaaattctgttcgcagcaaaagtgaaagacctgtatgtaaagaaagtttacnaantattttttgnttttangggcctttaccngaacaatcgnctaacttgggngttnggaatgntngcttnatntcccgacnttttttccctgnccggnggccgntcnaangggncaattccaccccttggggnccgttactattgganccggntcggtnccancttggggtaccnngcntacctgttc

SEQ ID NO: 607 - DNA, 326 bp, Homo sapiens
  misc_feature 289, 304: n = A,T,C or G
cctcaccgccgatgcaaggatagtcatcaacagggcccgggtggagtgccagagccaccggctgactgtggaggacccggtcactgtggagtacatcacccgctacatcgccagtctgaagcagcgttatacgcagagcaatgggcgcaggccgtttggcatctctgccctcatcgtgggtttcgactttgatggcactcctaggctctatcagactgacccctcgggcacataccatgcctggaaggccaatgccataggccggggtgccaagtcagtgcgtgaagtncctggagaagaactntctgacgaaagcctttgaaaac

SEQ ID NO: 608 - DNA, 336 bp, Homo sapiens
  misc_feature 298, 331: n = A,T,C or G
cctgctgtccaagcagagcacaaatgggttcctccgggacccctggtcctttttccagacgaggctgtggcactggtggaaagggagggagaatggagcctggcccttgtgtgtacaacaggaaatgcacctcaggacacagcaggagtcagcgggagggcacagacctgccccctgccaggcagaaaatgggcctcctcaagcacaaaagtgaccaagtacaattttcagttgctaaaacaagaaaagcttcagctagtttcattttcatgtgtagttattttctcttttgaataancaaaaccaagctaagctgtgtcagccaacttcnatctt

SEQ ID NO: 609 - DNA, 341 bp, Homo sapiens
  misc_feature 264, 307, 314, 325: n = A,T,C or G
ccacaaatggcgtggtccatgtcatcaccaatgttctgcagcctccagccaacagacctcaggaaagaggggatgaacttgcagactctgcgcttgagatcttcaaacaagcatcagcgttttccagggcttcccagaggtctgtgcgactagcccctgtctatcaaaagttattagagaggatgaagcattagcttgaagcactacaggaggaatgcaccacggcagctctccgccaatttctctcagatttccacagagacngttttgaatgttttcaaaaccaagtatcacactttaatgtacnttgggcncgcaccataantgaagagtggagccct

SEQ ID NO: 610 - DNA, 362 bp, Homo sapiens
  misc_feature 261, 267, 290, 295, 297, 307, 316, 334, 339, 357: n = A,T,C or G
tcctgggccagcccctgcccccagcccactgagggggtgggcttactccctgggcagtcttgggggccagagctgaggccagtccatattacagtggctgggctgtttttttcagtagcccctagcattggctgggattcctgttcctgggtgcgcctccacctcccttctgatgtttctggctatggtggggtgggaacctcagtttccccaaagtcttcctggatgctggcttcaggttgaagtccctggtcttcattnctcacnggttaggtaggggctcctgcatnacttnanaatccaattncaacccccntttcttaagaccttggcngaacnccttaggggaattcaacnactgg

SEQ ID NO: 611 - DNA, 76 bp, Homo sapiens
  misc_feature 34, 35: n = A,T,C or G
aagctttttttttttttttttttttttttttttnnttttttttttttttttttttttttttttttttttttttttt

SEQ ID NO: 612 - DNA, 614 bp, Homo sapiens
  misc_feature 173, 187, 246, 288, 301, 310, 314, 315, 328, 341, 367, 394,403, 420, 425, 432, 435, 457, 466, 477, 520, 524, 533, 534,547, 552, 556, 560, 572, 574, 575, 582, 592, 593, 601, 608: n = A,T,C or G
aaaaagaatgacgtttacatataaaatgtaattacttattgtatttatgtgtatatggagttgaagggaatctgtgcataagccattatgataaattaagcatgaaaaatttgtgaactcttttggtgttaaagttgcctttcttgatagagtgttcaatgcacacaaatccntaataatataacanggcaattcaatttgaagtatgttagaagggaatagagacacaggatacaaatgcataantccgattaactaatcggacatgtaaacagttcaaaaataacnaactctcctcttntctacaatnaaanncctcatgtccgtnaaaatccatttcnttaaaaaaacaaacttcctttcaaantgggtgtgaccccggttccaaaatgtnggatttggnaaaaaccctcatttaanttaanaggttantcngaacaaaagtgcggggctttanctgctcttngtgcccttgtnggcttcggggaaaggctcctgccctggagcttccttccccacntttnctggcttgnnaaggaaccctaanccagnaccncccnggccggaaaaangnnccatttnaccccgcatnnttaggctnttggganacctgg

SEQ ID NO: 613 - DNA, 338 bp, Homo sapiens
  misc_feature 308, 320, 337: n = A,T,C or G
cctacgtgttcctgctcttctgcggcgcctacctctacaaacagggctttgccatccccggctccagcttcctgaatgttttagctggtgccttgtttgggccatggctggggcttctgctgtgctgtgtgttgacctcggtgggtgccacatgctgctacctgctctccagtatttttggcaaacagttggtggtgtcctactttctgataaagtggcctgttgcagagaaagtggaggagaaagaaacacttgttttttattgtttagatttccctaacaactgttgaacttgccattaatcatgnagctcttattangtacaaatatgggaagnt

SEQ ID NO: 614 - DNA, 243 bp, Homo sapiens
  misc_feature 178, 191, 210, 238: n = A,T,C or G
aaagaataaagtctttgggaggtctcacggtgtagagaggagctttgaggccacccgcacaaaattcacccagagggaaatctcgtcggaaggacactcacggcagttctggatcacctgtgtatgtcaacagaagggatccgtctcttgaagagaactttactctatccttcactancccatctttctanggttactcgcgaccctagnatccccgcggattgacactgccactgcnttgat

SEQ ID NO: 615 - DNA, 187 bp, Homo sapiens
cctatcgcctttcacttgaggctgacagagcaaagagggaagctcacgagagagagatggcagaacagtttcgtttggagcagattcgcaaagaacaagaagaggaacgtgaggccatccggctgtccttagagcaagccctgcctcctgagccaaaggaagaaaatgctgagcctgtgagcaaact

SEQ ID NO: 616 - DNA, 381 bp, Homo sapiens
  misc_feature 293, 307, 319, 325, 338, 339, 348, 354, 356, 368: n = A,T,C or G
cctctgcctgctggggattactcgatcaaaaccttccttccctggctacttcccttcctcccggggccttccttttgaggagctggaggggtggggagctagaggccacctatgccagtgctcaaggttactgggagtgtgggctgcccttgttgcctgcacccttccctcttccctctccctctctctgggaccactgggtacaagagatgggatgctccgacagcgtctccaattatgaaactaatcttaaccctgtgctgtcagataccctgtttctggagtcacatcantgaggaaggatgtnggtaaaaaagancaaaanggcaggggtgctnnggacatttnggtggnanaaagggaggggnggaccttccccgg

SEQ ID NO: 617 - DNA, 315 bp, Homo sapiens
  misc_feature 212, 233, 274, 276, 284, 289, 302, 303, 312: n = A,T,C or G
ccacaaagccattgtatgtagctttagctcagcgcaaagaagagcgccaggctcacctcactaaccagtatatgcagagaatggcaagtgtacgagctgttcccaaccctgtaatcaacccctaccagccagcacctccttcaggttacttcatggcagcttccccagactcagaacgtgtgatcttctctgcaatgtactaacatctgtgntgtagggcgactatcttcaantgccggttccacgtcaacctagcttaacattacgtccattnancgcgtgtnatacnaatgccctaggcnngttttcgcncat

SEQ ID NO: 618 - DNA, 182 bp, Homo sapiens
cgcgcggtgtggtggcagcaggcgcagcccagcctcgaaatgcagaacgacgccggcgagttcgtggacctgtacgtgccgcggaaatgctccgctagcaatcgcatcatcggtgccaaggaccacgcatccatccagatgaacgtggccgaggttgacaaggtcacaggcaggtttaatgg

SEQ ID NO: 619 - DNA, 133 bp, Homo sapiens; identical to SEQ ID NO: 13

SEQ ID NO: 620 - DNA, 178 bp, Homo sapiens
ccatgcaggagttcatgatcctcccagtcggtgcagcaaacttcagggaagccatgcgcattggagcagaggtttaccacaacctgaagaatgtcatcaaggagaaatatgggaaagatgccaccaatgtgggggatgaaggcgggtttgctcccaacatcctggagaataaagaagg

SEQ ID NO: 621 - DNA, 280 bp, Homo sapiens
  misc_feature 159, 166, 187, 220, 229, 233, 240, 252, 256, 271, 272: n = A,T,C or G
aaaaagcagcagtgtcctatgaagtggaaatgtcagttctagagcattggatgtgaagttctggtcatgtcaccttgcgtgtctcaccctggaggagtgaaggtgggcgcccggcgggggggtgtggctgcaccccagcaccgggagggggcacgcacnacaccanaggaagggacagccccacccntgtcaacagcaggcaacctgtgtgttcatttcnagtgggatncagnatttttntaaaatggggcntacnttttttaagagtttnncacctgaa

SEQ ID NO: 622 - DNA, 311 bp, Homo sapiens
  misc_feature 299, 300, 303: n = A,T,C or G
cctcggcgactccaaccagttcttccgggacgtcacggcggactttgagggccagagtcccaaatgcacccagggtgtgcgggaagcgttccgacagatcaaggacttgttcctacagggagcctacgacacggtccgctgggagttcggcacctgccagccgctgtcagacgagaaggacctgacccagctcttcatgttcgccggaatgcttaccgtgctggactgccgggcggcgtcaaggggaattcagacactggcggcgtactagtggatcgactggacaacttggtatatgnntantgtctttg

SEQ ID NO: 623 - DNA, 269 bp, Homo sapiens
  misc_feature 102, 185, 203, 218, 242: n = A,T,C or G
ccagcatggtgggatttatgtgcatgaaaagggacaaggagtaatagaagagaatgaagtttatagtaacactctagctggagtctgggtgacgactggcancactccagtactgagaagaaaccggatacacagtggcaagcaggttggtgtttatttttatgacaatggacatggagtgctanaagacaatgatatctatnatcatatgtcttcangggtcagatacgctgaacaacccnaaatagcgcacaaattgggggaacatg

SEQ ID NO: 624 - DNA, 365 bp, Homo sapiens
  misc_feature 226, 256, 272, 283, 295, 318, 319, 320, 342, 347, 355, 356: n = A,T,C or G
cctacagacttatttcttcttggacacacccacggtgcggccacggcggccagtggtcttggtgtgctggcctcggacacgaaggccccagaagtgacgcagccctctatgggcccgaatcttcttcagtcgctccaggtcttcacggagcttgttgtccagaccattggctaggacctggctgtattttccatcctttacatccttctgtctgttcaagaaccantctgggatcttgtactggcgtggattctgntaatggtgatcacacnttccaccttancctcagcggagntcttcccgcccttttggggaggnnnattgatctgtttttcctttatncctgncctccgtnngtggctttt

SEQ ID NO: 625 - DNA, 391 bp, Homo sapiens
  misc_feature 50, 51, 63, 319, 352, 359, 363, 366, 386: n = A,T,C or G
atgggcctctgatgcatgctcgagcggccgccagtgtgatggatatctgnnaattcgccttancgtggtcgcggccgaggtccttgaccggaaagggtacaatgccagggagtactacgaccacctgcccgagctgaagcaggccgtggaccagatcagcagtggctttttttctcccaaggagccagactgcttcaaggacatcgtgaacatgctgatgcaccatgacaggttcaaggtgtttgcagactatgaagcctcatgcagtgcaggcacaggtgaccaactgtcccgaaccccaaggagtgaccaagaaggnatcaggacatcgctgtcggcaggtcttcagtgnccgaccntacnganatgcccggagatctgggtgngagcc

SEQ ID NO: 626 - DNA, 489 bp, Homo sapiens
  misc_feature 10, 53, 64, 101, 140, 201, 228, 253, 418, 433, 440, 460,470, 471, 485: n = A,T,C or G
actttcaacnttatttaagggggggccgggaaaaatttgggggggcccccccnttctttaaggnaatgggcccaatgggcccttccggaaggcccggggcncccggccccaggtgggtgggaattgggggaattatttcnttggccaggaaaatttccggccccctttttcgtagacgggcccggccccgggggccagggntaaaaaaacgggtgtgttgttccgggnagggggggttgaaaagcattaaagnaagcccagtgccctcctggagtgagacaaggggctcggccttaaggagctgaagagtctgggtagcttgtttagggtacaagaagcctgttctgtccagcttcagtgacacaagctgtttactaaagtcccgggttcggatggtaggtgagacagattcctggtntagtttggtgaaganagaatantcttctcatgaaattgctantggtaatcannctgcgaccctaggnatca

SEQ ID NO: 627 - DNA, 442 bp, Homo sapiens
  misc_feature 2, 11, 21, 26, 52, 223, 374, 377, 386, 389, 408, 419, 422,431: n = A,T,C or G
tncatagggcnatggccctcngatgntgctcgagcggcgccagtgtgatggnatctgcagaattcgcctttcgaggggcgccgggcaggtccctctgccaaggagctgcgaccatcaggacgcctgcagacatttacagagcctttgttgatgttgtgaatggagaatatgtccctcgcaaatccatcctgaagtctcgaagtagagagaatagtgtgtgtangcgacactagtgaaagcagtgctgctgaatttgatgataggcggggagttttgaggagtatcaagctgcgaagaagccacttgcagtgacaccagtgagagcattttggaagaagaaccacaagaaaatcaaaagaaacttttgccttatnaanaacacctgnggntttttttgaacttgtatanaaagaaattgnttnccttccttnccccccccacc

SEQ ID NO: 628 - DNA, 316 bp, Homo sapiens
  misc_feature 284, 309, 312: n = A,T,C or G
cctacagacttatttcttcttggacacacccacggtgcggccacggcggccagtggtcttggtgtgctggcctcggacacgaaggccccagaagtgacgcagccctctatgggcccgaatcttcttcagtcgctccaggtcttcacggagcttgttgtccagaccattggctaggacctggctgtattttccatcctttacatccttctgtctgttcaagaaccagtctgggatcttgtactggcgtggattctgcataatggtgatcacaccgttccactcantcctcaagtgaggtctcccccctcntgngagg

SEQ ID NO: 629 - DNA, 424 bp, Homo sapiens
  misc_feature 249, 264, 280, 302, 304, 326, 344, 345, 362, 371, 380, 387,404, 411: n = A,T,C or G
ccttgcgccggaacatggcagtgaactgctccgagatgcgcttgaagagctcctggatggctgtgctattgccaatgaaggtgactgccatcttgaggccacgaggtgggatgtcacagacggctgtcttgacattgttggggatccattccacaaagtagctgctgttcttgttctgcacgttaagcatctgctcatcgacctccttcatggacatccgacccggaagacacaccacggtaggatcgncgtggcggggccagnagcatatgtcttgatnaaactctgggattcggctgaancnacctgttgttccgtgggaaggnaaccagataaaatgaacnngaaggactgtatgcctncgagacttnctgctcgcnacccagnatcaccatgcgcgtctntgaccantgtcactgtattg

SEQ ID NO: 630 - DNA, 339 bp, Homo sapiens
aaagcttttagagaatacactacaccagggagtatgactactagtatgactattaggagggtaataccaagagttggactacgcaccttaggcaagatacaaaccaactaaaatagaataaagaatgagtcagatgagtgtagccattttaaccaagcagcacatttgttaatttctacaacttagtctcagcgatacccattgtatttagccatgttcaacaacaagtgtcagaaactgcacagactcctccctgttcagctggtagggagcaattctattatttggcattgcatggctgggttgaattaaaacagggagtgagaacaggtgagtcta

SEQ ID NO: 631 - DNA, 411 bp, Homo sapiens
cctgggcctccttgccagctgaagtgctggactccctggtcagcaatgtcaacattgagctgctcaatgccctccgctaccatatggtgggcaggcgagtcctgactgatgagctgaaacacggcatgaccctcacctctatgtaccagaattccaacatccagatccaccactatcctaatgggattgtaactgtgaactgtgcccggctgctgaaagccgaccaccatgcaaccaacggggtggtgcacctcatcgataaggtcatctccaccatcaccaacaacatccagcagatcattgagatcgaggacacctttgagacccttcgggctgctgtggctgcatcagggctcaacacgatgcttgaaggtaacggccagtacacgcttttggccccgaccaatgagg

SEQ ID NO: 632 - DNA, 722 bp, Homo sapiens
  misc_feature 497, 499, 520, 529, 547, 562, 563, 571, 581, 596, 599, 621,634, 638, 645, 650, 657, 662, 674, 675, 679, 689, 703, 715: n = A,T,C or G
aaatggtcagcagtccaaatgcattgaaaaatagcatttggtttacacagaactgttggaacagatctactgtgtaaagcaaaatgaaccaattcttgaaaagtgttccagggccacaggttcttagattgggaagcaagatgacagttctgactagcttagttttccagactgaaagtaatggaattaaaataatgataactgtagaccttctcccctaaggatggtgccctggggctttggggaaaccaggatggaggcagaatcactgcctcacttcttcagcttagggcctacagaaactcactggcattgccagtaacctgttggaagctggcacagccaatctacagcagagagccctgggatgaggatgccccaggaggaaaagaaattggcaccagggaaattatggcctgaagagggagaagagccaggggaggaatgaaaccatagatgggcaactcctgggctcacagtttccctggattctttananggcctctctcagcccctaaanacctggtancctatggtaacttacccnggaaatagggagganncctttganggcccaaagntttaaaaaaaaatanccncctcctcttttgaatgggaacnaagaaggtgaaanctcnctgatgnttctnacttgcnggaancccaaaaagttnnggtncaattcttgnggaaaaaacccaanacttgggtttcnccttaat

SEQ ID NO: 633 - DNA, 438 bp, Homo sapiens
ccaagaatctcttcgttcttcctggaacacttactatactaacacagagtttgtaatagttgttgtggacagtacagacagagagaggatttctgtaactagagaagaactctataaaatgttagcgcatgaggacctaaaaaaagctggattgctgatttttgctaataaacaagatgttaaagaatgcatgactgtagcagaaatctcccagtttttgaagctaacttctattaaagatcaccagtggcatatccaggcatgctgtgctctaactggcgagggattgtgccaaggacttgaatggatgatgtcacgacttaagattagatgatctctactgaccccttctcatagattttgtataaatgaagtgctggactttacctgaaagctgcaaaaattaatggtttagatatatttataataaactgattt

SEQ ID NO: 634 - DNA, 258 bp, Homo sapiens
  misc_feature 14, 25, 26, 115: n = A,T,C or G
cctggggtgggatnagaggatctanngtggcatcccgtagccagtcatgcctgcctgagacgccccgcggttggtgcccatctgtaacccgatcacgttcttgccctcttgcagntggttatccgagaagttccgaggattctccttggatttcttagggaaccagttgggatccccagagaagagcccatcatctcgggctactgccagcccacccagattcatcagcgtccgctgcacacaggccatgttctttcc

SEQ ID NO: 635 - DNA, 359 bp, Homo sapiens
aaaggctaccacgagacggggtggaaatgccaaaaatggcacctcatctctgatcaaagattcagagcatgcaagtgttgatgccatgaagagtcccagccttctccccactaaaataccaggcaacgcttagcagctgctgtcctaacaggctactttctgcaactgctgacgcaggttagttcatgtggttaaaggtcagaacgctggccccttacagagctgaagtgctcccacactcatcactggctctggagggaaaagaccactagctgtaacttctacaaaactttttttcacaaaatgtaaaacaataacaaaacctacctgccagggtgataatgccgtagcgtgacttt

SEQ ID NO: 636 - DNA, 549 bp, Homo sapiens
  misc_feature 416, 490, 517, 530, 542: n = A,T,C or G
ccaaaccaaccgcacccctgaatttctccgcaaatttcctgccggcaaggtcccagcatttgagggtgatgatggattctgtgtgtttgagagcaacgccattgcctactatgtgagcaatgaggagctgcggggaagtactccagaggcagcagcccaggtggtgcagtgggtgagctttgctgattccgatatagtgcccccagccagtacctgggtgttccccaccttgggcatcatgcaccacaacaaacaggccactgagaatgcaaaggaggaagtgaggcgaattctggggctgctggatgcttacttgaagacgaggacttttctggtgggcgaacgaatgacattggctgacatcacagttgtctgcaccctgttgtggctctataacagttctagagccttctttncgccaggaccttcgggccgcgaacccgcttaagggcgaatttccacacacttgggcgggcccggttacttaatngggattccgaaacttcggtaacccaanacctttgggcgtnaaatcaatgggnccattaa

SEQ ID NO: 637 - DNA, 645 bp, Homo sapiens
  misc_feature 415, 434, 466, 478, 528, 545, 566, 589, 590, 600, 607, 615,623, 627, 630, 633, 638: n = A,T,C or G
aaagaatcagcaaaatttcaaataaaaaattatgaaaatattatcctcattagttcatttagtcccatgaaattaattattttctctgcttgatcttggtggacagtttcatgaagctgtcagttagttcattaaagttttggaaaattcttcagacagtgcagtgggtatcagaaacttgtattcaagagtacaggtcagagtcttcttttcttttctttttgagatggagtcttgctctgttgccagactggagtgcagtggtgcgatctgggctcactgcaatctccacctcccgggttcaagcgattctcctgcctcagcctcccgagtaactgggactacaggtgcgcgccaccaagcccagctcatttttgtatttttagtagagatggggtttcacgatgttggctangatggtctcgatctctggncagagtcttttctgtaaatatccttggtaaanaacaaattttanactggtagcttgttcaaatgctttaaggaagaagccaaacaactggcagncttccttgaaatggaanaacctaccccagggcttgctnttttagaacaacccccaacccannacttccaatnatgaatncccacagngggccccngctnganaanacccnggaaaaa

SEQ ID NO: 638 - DNA, 385 bp, Homo sapiens
  misc_feature 350, 354, 364, 368: n = A,T,C or G
aaaacagtgaaaagaaaaataaatatctgaagaataagaatacagggctgggtgcagtggctcatgcctgcaatcccagcactttgggaggcggaggcaggtggaccgcttgagcccaggagttcgagaccagcctgggcaacacagtgagacccccctctttacaaaaaatacaaaaattagccaggtgtggtggtgcacctgtagtcccagctacttgagaggctgaggtgggagggtcacttgaacccaggagtcggaggttacagtgagccctgatgggccactgcactccaacctgggcaacggagcaagaccctgtctaaaaaaaaaaaaaaaaaaaaatcccngatngggggggggnattnggggttgaaaacttagg

SEQ ID NO: 639 - DNA, 261 bp, Homo sapiens
ccagggctaccttatcaaggacggcaagctgatcaagaacaatgcctccactgactatgacctatctgacaagagcatcaaccctctgggtggctttgtccactatggtgaagtgaccaatgactttgtcatgctgaaaggctgtgtggtgggaaccaagaagcgggtgctcaccctccgcaagtccttgctggtgcagacgaagcggcgggctctggagaagattgaccttaagttcattgacaccacctccaagtttgg

SEQ ID NO: 640 - DNA, 303 bp, Homo sapiens
  misc_feature 104, 167, 213, 246, 259, 264, 266, 274, 283: n = A,T,C or G
cctgagtgggggacttgcaagggctgatgggtaacccctcccacctgctgctactccctgccccaaaaagcagcttggctcacaagcctgggcatgcagggcancacgaggagctgagcatggagtgtgggggtggagaaagtaccccgcaccttccagtgggcagnagtagacaaggggtagcaccaaacagaaggacccctccccagcacncacaacatccaccttcaattaccagatgcactnctgctccctaaangaaananacacacanacacacacncacacacacacacacactca

SEQ ID NO: 641 - DNA, 295 bp, Homo sapiens
cctttgagcgggccatcgcgggcgacgagcacaagcgctccgtggtggactcgctggacatcgagagcatgaccattgaggatgagtacagcggacccaagcttgaagacggcaaagtgacaatcagtttcatgaaggagctcatgcagtggtacaaggaccagaagaaactgcaccggaaatgtgcctaccagattctggtacaggtcaaagaggtcctctccaagctgagcacgctcgtggaaaccacactcaaagagacagagaagattacagtatgtggggacacccatgg

SEQ ID NO: 642 - DNA, 607 bp, Homo sapiens
  misc_feature 438, 526, 543, 549, 572, 581, 586: n = A,T,C or G
ccacatggagctgctttctggggaacagtaaggttcaggccactatttaggggactgagaaagcacaggcttcatgagtgtaatgaaatctcaccagaagtgtcccgaaatcggctcagatagggctcaaaacaagagattcctctccttttactgtgtcttgtattaagtacgggctttaataatttctttaatttttttgtatttagaggaaaatctatagattatttataagagaaacataatcaggattacaacttttaggaattacttggttttgcacattaagaggcccataagtttatcagctatttacaaccttcatttcatcacaatctgtgggcttacaaaaaaacaaaaacttttgtagttttgtatgttactcatcttcttacctgatatcccatgatgatcccatggtagggtcttctcacctcnatggtgcataacaggatgtggttgaacctagtagggggaggaaaacaggctttcttactctgggttaatttgaaggggttttaatggngatgtcaaaaagttgtntcacancacttaaatgggggagccagacngagaaatgnaaagnagttgattttggacctcggac

SEQ ID NO: 643 - DNA, 446 bp, Homo sapiens
  misc_feature 416: n = A,T,C or G
ccttgttctctgcttcacactcaatgtgtgggggggtctgagtccagcacttctgagtccctcagcctccactcaggtcaggaccagaagtcgctgttccctcttcagggactagaattttccacggaataggagattatcccaggtgcctgtgtccaggctggtgtctgggttctgtgctcccttccccatcccaggtgtcctgtccattctcaagatagccacatgtgtgctggaggagtgtcccattacagatgcaaaatgcctgaatgttctgactcttcctgacagacccccccaggacgcatatgactcaccacgctgtctctgaccatgaggccgccctgaggtgctgggccctgagcttctaccctgcggagatcacactgacctggcagcgggatggggaggaccanacccaggacacggactcgtggagaccagga

SEQ ID NO: 644 - DNA, 223 bp, Homo sapiens
aaaaaggggaggctcgctatctaagaatcatgtttctgtaaagaaaaagtgctctttccaccccggtagggaggtgctgaggtgctgcagtgtctgcactgagtgcacacactgtcgcacttgcaactgaccagtgggtcttcacaggtgcggagaggccagcttctcggtcttcacctccaggagggccgggcttttcctctccctggtcacgtggagctgg

SEQ ID NO: 645 - DNA, 402 bp, Homo sapiens
aaaaagaaggacttagggtgtcgttttcacatatgacaatgttgcatttatgatgcagtttcaagtaccaaaacgttgaattgatgatgcagttttcatatatcgagatgttcgctcgtgcagtactgttggttaaatgacaatttatgtggattttgcatgtaatacacagtgagacacagtaattttatctaaattacagtgcagtttagttaatctattaatactgactcagtgtctgcctttaaatataaatgatatgttgaaaacttaaggaagcaaatgctacatatatgcaatataaaatagtaatgtgatgctgatgctgttaaccaaagggcagaataaataagcaaaatgccaaaaggggtcttaattgaaatgaaaatttaattttgtttt

SEQ ID NO: 646 - DNA, 109 bp, Homo sapiens
ccaggaggcagggctgggcaggatgactggggctacatggggcttggcccttccctgtggctggcagcccagatgctgcagtaacactcattcccaggcttcactatgg

SEQ ID NO: 647 - DNA, 177 bp, Homo sapiens
ccactggctccctgggccagggcctcggggccgcttgtgggatggcctacaccggcaaatacttcgacaaggccagctaccgagtctattgcttgctgggagacggggagctgtcagagggctctgtatgggaggccatggccttcgccagcatctataagctggacaaccttgtgg

SEQ ID NO: 648 - DNA, 240 bp, Homo sapiens
ccatgttggcaaaggtgtagtacaggtagtaggcatagggtgggttgtcctcctccacccacgcctcaggcagggggctctccaagttgaagacatggttttcaggcttggactcatcatccacgctgtcaaaaccatccacgtgctctaagaagagatgcagttccgggtggctggcagggtgcacagtggcctcgaacagtggcaggaagatgttctccagcatctcctggaagtcgg

SEQ ID NO: 649 - DNA, 501 bp, Homo sapiens
  misc_feature 170, 200, 226, 228, 246, 256, 261, 265, 280, 284, 285, 302,303, 315, 330, 331, 335, 341, 358, 366, 369, 371, 378, 379,384, 392, 399, 400, 408, 417, 434, 435, 444, 473, 475, 482,496: n = A,T,C or G
aaaaaaaagtctggaaattaagcaaacattcctaacaccagctagacgatgttccggttaaagcccctaaaatacaaagaaataattgttatactttctttacatacaggtcttcacttttgctgcgaaacagaattttgggcacacagccagactactaacacatttcnataccattaatatgttttggtttttctcanaaactcaaatatttgttaattcaacntnttttaagaacattttacntgggaaaatnccaanaccnaaaaaaataacttgnaacnngcctttttccaattttnnaaccaagtttantttccttccaatctnngccnttcccngttttttggtttttttnttaatggnccncngggaccnngatcntttttttncaaccannacttaagnacctgggcnggaacccccttaagggnnaaattccancaccttgggggccgttccttgggaatccnanctgggtnccaaatttgggggnaatca

SEQ ID NO: 650 - DNA, 325 bp, Homo sapiens
ccaggccattgccatggcccctcccatctacacagatgtcttagagtttgacgatggcaccccagctaccatgtcccagatagccaaggatgtgtgcaccttcctgcgctgggcatctgagccagagcacgaccatcgaaaaccatggggctcaagatgttgatgatgatggctctgctggtgcccctggtctacaccataaagcggcacaagtggtcagtcctgaagagtcggaagctggcatatcggccgcccaagtgaccctgtccagtgtctgcttgccatcctgccagaacaggccctcaagcccaagagccatcccagg

SEQ ID NO: 651 - DNA, 223 bp, Homo sapiens
  misc_feature 157: n = A,T,C or G
aaaaaggggaggctcgctatctaagaatcatgtttctgtaaagaaaaagtgctctttccaccccggtagggaggtgctgaggtgctgcagtgtctgcactgagtgcacacactgtcgcacttgcaactgaccagtgggtcttcacaggtgcggagangccagcttctcggtcttcacctccaggagggccgggcttttcctctccctggtcacgtggagctgg

SEQ ID NO: 652 - DNA, 476 bp, Homo sapiens
  misc_feature 443, 454, 458: n = A,T,C or G
ccagtgagaggcactccctgcagggatttcacagcccaaatggcgggaccgtccaggggctccaagaccaacaggagcatgtggtagccacgtcacaacccaagaccatggggcatcaggacaagaaagatctatgtgggcagtgttccccgttaggctgcctcatccggatattgattgacgggatctctctcgggctcaccctgcgcctgtgggacgtgtatctggtagaaggcgaacaggcgttgatgccgataacaagaatcgcctttaaggttcagcagaagcgcctcacgaagacgtccaggtgtggcccgtgggcacgttttttgcaaccggttcgttgatacctgggccagggatgaaggacactgtgctcaagcatcttagggccttctatgaagaaactaacaagaaagcaggggggaccttgcaacccccanccaaacccgancaanggtcgtcggcattcaggg

SEQ ID NO: 653 - DNA, 311 bp, Homo sapiens
  misc_feature 160, 170, 210, 216, 230, 233, 255, 259, 265, 271, 279, 283,288, 289, 296, 305: n = A,T,C or G
cctgagcggctagtctttaagatgcgcttctatcgtttgctgcaaatccgagcagaagccctcctggcggcaggcagccatgtgatcattctgggtgacctgaatacagcccaccgccccattgaccactgggatgcagtcaacctggaatgctttgaanaggaacccangggcgcaagtggatggacaccttgttcagtaacttggggngccagnctgctctcatgtanggncctttatcgatagctaccggtncttncaaccnaaacangagggggncttnacctnntggtcancagtcactngcgccc

SEQ ID NO: 654 - DNA, 412 bp, Homo sapiens
  misc_feature 159, 167, 204, 206, 235, 243, 249, 250, 257, 259, 271, 285,288, 292, 306, 307, 316, 320, 326, 338, 339, 348, 361, 378,385, 392, 399, 400: n = A,T,C or G
cctgagtgggggacttgcaagggctgatgggtaacccctcccacctgctgctactccctgccccaaaaagcagcttggctcacaagcctgggcatgcagggcagcacgaggagctgagcagggagtgtgggggtggagaaagcaccccgcaccatccangggcagantagacaagggtagcaccaaacagaaggacccctcccnancacacacaacatctaccctcaattaccanatgcactnctgctnnctaaaanangacacacacacncacacacacacacnctngggngacagtaatattanngggagaccnagcnctggcnaggaaaaatctnnacgggtggnggagaaaaaaggnttgccaatccctcccanaatcccnctttttnaagacannaaggggtgaggc

SEQ ID NO: 655 - DNA, 327 bp, Homo sapiens
cctggaagcccacggggtgcagcatcctcaagcccaggggcgggagcgcctccggcctgccctccagggaagctgcatgtggacctccacggtattcagcctccagtttagtcagccttgagtctgggctgctcccgcacctggtgttttatgcgtgtgatatatgtgtatccatcctgcttccctgccttcaagggaagacttaactctccgagagaaaacctgcctggagctgcgcacattctcacagcttgagaacgcttgacgcaggaagtcaccagagtactcaagtcaaccgcaaactagtggttacaaaatgggagcttt

SEQ ID NO: 656 - DNA, 512 bp, Homo sapiens
  misc_feature 157, 225, 338, 342, 346, 350, 364, 372, 381, 393, 394, 396,414, 417, 419, 428, 439, 464, 481, 485, 486: n = A,T,C or G
aaatatggagttctttcagtggagagtaaaggtgctcctcctctgtgtctggtttacacggctccgcgagaccaaagggcccctcggtctccttgagcagcctggcactctgcacagaggatccaggaacggtgtcatggagccacattctgcacanacttgatgatgtggaggggagcttgcctggatcacttcagcgcatcagttgtgatggggagaaccaangcactttagggcgggaattgcgtctggccacctgttgcctttcacctgaaaggaagaattcccagtgctcacagtgaggataggactggaaaagcgttggtttcaaggaaagngcanggtntggnttcttgccactgcnaacatctnattggccangggaactttttnncnttgggaacttcagttttnttntnttttaatgngaaccattagnatgaccccactggttcttgaagaangaaagcctttgctttcnttcnnggaatttcttaaaaacctctttttcc

SEQ ID NO: 657 - DNA, 824 bp, Homo sapiens
  misc_feature 325, 326, 408, 419, 424, 428, 458, 492, 495, 499, 511, 524,534, 538, 567, 602, 626, 630, 647, 664, 671, 677, 703, 709,721, 739, 821, 822, 824: n = A,T,C or G
cctctcatttttagttaatcacgattcctctcctcttgagatcctctggaccttctccatctacctggagtccgtggctatccttccgcagctgtttatgatcagcaagactggggaggccgagaccatcaccacccactacctgttcttcctggcctctatcgtgctttgtatcttgtcaactggatctggcgcttctactttgagggcttctttgacctcattgctgtggtggccggcgtaagtccagaccatcctatactgtgacttcttctacttgtacattacaaaagtactcaagggaaaagaagcttaagtttgccanncataaagtgccaaaagaccattcaccaagcatctggtccttttaaggggtgcttcgggacaagaaattctttacccacaagncaaaagggcantaaanaaangcctttggaattcccgggaaaaaaatcaanaaaaacctttaaacttcttttttggtttggcaanaanaagntcaattcaagtngggcttcttggtnaaaaaaaccncccngaagggaaaaaagaaaccccagaaagggntttcttggtttaaaaggcaatctttggcccttaancctttttttttaattaactggggnaccnaaagaatttttttaccncaaaagaaaacttaaangctgganttaaanaaaattcaagggggagccttcaaatngggggngttcccaaaagngaaaaatttgggaggaanaaggggcaattttttttttttaacttggccggaaccccttaagggggaatccaaaacctggggggttctagggaccaacggnncn

SEQ ID NO: 658 - DNA, 124 bp, Homo sapiens; identical to SEQ ID NO: 482

SEQ ID NO: 659 - DNA, 135 bp, Homo sapiens
ccttaatagttaagttacagctaagaatgtcatgtcttgggttagaattttcatttttagcaccgttaatgtattcacttaaatctatgttagcaccttgtctccaggcagaacaacaaaccatccaaacatttt

SEQ ID NO: 660 - DNA, 589 bp, Homo sapiens
  misc_feature 310, 340, 367, 400, 403, 409, 421, 462, 472, 481, 488, 494,496, 498, 512, 514, 534, 535, 562, 575: n = A,T,C or G
ccagcaccaaggcttataccagtcagttcatctctctggtgatgtttggtttgatgatgtctgaagaccgaatttcactacaaaacaggaggcaagagatcatccgtggcttgagatctttacctgagctgatcaaggaagtgctgctctggaggagaagatccacgacttggccctggagctctacacgcagagatcgctgctggtgatggggcggggctacaactatgccacctgcctggaaggagccctgaaaattaaagagataacctacatgcactcagaaggcatcctggctggggagctgaancacgggcccctggcactgattgacaagcanatgcccggcatcatggtcattatgaangatccttgcttcgccaaatgccagaacgccctncancaagtnacgggccgccangggtccccccattatactgggcttccaaggacgatacctgnaagttcccangtttgcctntaaaaanaatttnancntgccccccccttgngnactggctttcaggggcattnntgagcggggaattcccttggaagtggntgggcctttcccntgggttgtttttcc

SEQ ID NO: 661 - DNA, 251 bp, Homo sapiens
aaaatttacatgtgcacacaaacaaacacaggttcccccacccatggggaagggcgagatgactctgaataaaggatggaggagaagaagagggtgtagacggagggcccttgacccctacaggggcagcaggataaggaatagagtgggggcagaaaggtgggttattaaaaaagcatcttgcttacttgacatgaaagccaccgtgcccagcgaagaagcacagatgaaggacctcggccggcgaccac

SEQ ID NO: 662 - DNA, 654 bp, Homo sapiens
  misc_feature 485, 505, 514, 529, 545, 565, 581, 605, 608, 609, 627, 649: n = A,T,C or G
aaaaagtttcaggtcacaacccttgcagaaaacactgatgcccaacacactgattcgcggtccaggaaacacgggtcttccaagttccaaggggctggggttccccaacgatcaagttcctgtgctgtaatcaagagggtcctttggactggatagggagcacttgggagctgtacaccatcagtcataatggatggcagtgtaaaagatgatccaaatgaccatgaacaaggcaaaagaggtcataaacccttccttcgtgagctcccacgtgccaccatattcttcctcatcaatctgtaggtaattgctgaagtagaggtacaggactcctgcattgatcaggcagaatcctgctattcccaagaaccctcgtaatggcaaaacttccccaaatgacaccccaggaccacagcaatgatcttgtcgggaacccagtaggaatcaccatcttaaaaaatttcaatccctttttccttccccanggcccgcggtcggtttcccnaagcaaccnttacctccaaaaaanggaaaaacttttgaangggcccccctttgggaaccnttgggcccgggaaccnccccttaaaggggggaaattttcnaannacaccttgggggggccgntttactttagggggaattcccnacctt

SEQ ID NO: 663 - DNA, 349 bp, Homo sapiens
aaaagactattttactaaatttggagaggtcgttgactgtacaataaaaatggatcccaacactggacggtcaagagggtttgggtttatcctgttcaaagatgcagccagtgtggagaaggtcctagaccagaaggagcacaggctggatggccgtgtcattgaccctaaaaaggccatggctatgaagaaggacccggtgaagaaaatcttcgttgggggtctgaatcctgaagccactgaggaaaagatcagggagtactttggcgagtttggggagattgaggccattgaattgccaatggatccaaagttgaacaaaagacgaggttttgtgtttatcaccttt

SEQ ID NO: 664 - DNA, 330 bp, Homo sapiens
ccaggccattgccatggcccctcccatctacacagatgtcttagagtttgacgatggcaccccagctaccatgtcccagatagccaaggatgtgtgcaccttcctgcgctgggcatctgagccagagcacgaccatcgaaaacgcatggggctcaagatgttgatgatgatggctctgctggtgcccctggtctacaccataaagcggcacaagtggtcagtcctgaagagtcggaagctggcatatcggccgcccaggtgaccctgtccagtgtctgcttgccatcctgccagaacaggccctcaagcccaagagccatcccaggacct

SEQ ID NO: 665 - DNA, 171 bp, Homo sapiens
  misc_feature 149: n = A,T,C or G
ccaagctgatcatcaagttggtcacctccatcggcgacgtcgtcaatcatgacccagttgtgggtgacaggttgaaagtgatcttcctggagaactaccgtgtgtccttggctgagaaagtgatcccggccgctgatctgtcgcagcanatctccactgcaggcaccgagg

SEQ ID NO: 666 - DNA, 636 bp, Homo sapiens
  misc_feature 487, 522, 527, 528, 554, 555, 561, 566, 594, 599, 614, 627: n = A,T,C or G
cctgagtcacctagcatagggttgcagcaagccctggattcagagtgttaaacagaggcttgccctcttcaggacaacagttccaattccaaggagcctacctgaggtccctactctcactggggtccccaggatgaaaacgacaatgtgcctttttattattatttatttggtggtcctgtgttatttaagagatcaaatgtataaccacctagctcttttcacctgacttagtaataactcatactaactggtttggatgcctgggttgtgacttctactggccgctagataaacgtgtgcctgtcccccaggtggtgggaataatttacaatctgtccaaccagaaaagaatgtgtgtgtttgagcagcattgacacatatctgctttgataagagacttcctgattctctaggtcggttcgtggttatcccattgtggaaattcatcttgaatcccattgtcctatagtcctagcaataaganaaatttcctcaagtttcatgtgcggttttcctaantgcannaatcctttgacatttacctcggccgnnaccccncttanggggaattccacacccttgggggccgtncctanggatcccaactcggnccaaacttggggnaatcatggc

SEQ ID NO: 667 - DNA, 742 bp, Homo sapiens
  misc_feature 496, 516, 573, 576, 578, 663, 677, 682, 687, 700, 706, 719,733, 734: n = A,T,C or G
ccagttagattatgggtccaaagggattccagacacttctgagccagtcagctaccacaactctggagtaaaatatgctgcatccgggcaagaatctttaagactgaaccacaaagaggtaaggctctccaaagagatggagcgacccttgggttaggcagccttctgccccagagaaacactccagagactgctacaaggaggaagaacacctcactcagtcaatcgtcccaccccctaaaccagagaggagtcatagcctcaaactccatcatacccagaacgtggagagggaccccagtgtgctgtaccagtaccaaccacacggcaagcgccagagcagtgtgactgttgtgtcccagtatgataacctggaagattaccactccctgcctcagcaccagcgaggagtctttggagggggcggcatggggacgtatgtgccccctggctttcccatccacagacaggacctatgctacagcgttgggtcaangggccttcctgcccccaganttgtctttgcagcattctgaacacagatccatgcagaatgagccctgcgagcaatanaantngaagcagcctctgctggacaatggactggtctatttttttcattcccccaaggattaaccaaaattcttttaaaccctgaccacnttacttgcccgggngggcnctttnaaaggggaaattnacacantggggcgttctangggtcccacctcgnnccaacttg

SEQ ID NO: 668 - DNA, 642 bp, Homo sapiens
  misc_feature 362, 411, 485, 488, 500, 538, 560, 598, 625: n = A,T,C or G
cctctcatttttagttaatcacgatttctctcctcttgagatcctctggaccttctccatttacctggagtccgtggctatccttccgcagctgtttatgatcagcaagactggggaggccgagaccatcaccacccactacctggtcttcttgggcctctatcgtgctttgtatcttgtcaactggatctggcgcttctactttgagggcttctttgacctcattgctgtggtggccggcgtagtccagaccatcctatactgtgacttcttctacttgtacattacaaaagtactcaagggaaagaagctcagtttgccagcataagtgccaaagaccatcaccagcatctgtccttcanggtgctcggacagaattcttaccacagcaaaggcataagatgcttgatncggaaaatcagaaacttaactcttttgttgcagatagtcatcaagtggctcttgtaaaaacgcagaggaaaaanccngaagggttctgnttaaatgcatcttgccttatctttttttattactgtgnacaaaaaattttttacacaaanaaaacttaatgctgtattaataaaatcaggggggagcntcaatggggaaagttcccaaagtgaanaatttgggaggaaaaag

SEQ ID NO: 669 - DNA, 543 bp, Homo sapiens
  misc_feature 153, 159, 428, 432, 435, 443, 447, 455, 465, 469, 484, 486,488, 497, 514, 527, 530, 534: n = A,T,C or G
aaataacagcatgtaaaatattaaaatacaagctttcaaaaataaatacataaataagtagaaccctcgtaagaaatagtcaaacacattaagtcctttccagctgtccctagaaagctgctgttctctttttcattttcagctctgggaaangggcangggaccaccctgcaggaagtgtcaatgatacgctgataagcttcttacttctctcctgtcagttggtgctccccctgtgatgagaaaagggttactgttgcaggtgctaaggaaggctgctcttctgtcactctgaagttgcttggagggatgtccccatgcagactctctcccagccctccactcagggaaggtctgtctgtacccactgccctctatagcagaaaacttgcactcctgaatgcttttttttttttcaaaaaaaaaangggntgnggactcanctanattcttgntttgaaaaanccanaacatatgggcctgntngnccattgggntaaaaaggcccttcttnatctcctttaagnggnccanccctttaaa

SEQ ID NO: 670 - DNA, 440 bp, Homo sapiens
aaaaaggcttgtgcacttgcccaggctcaaggatattaaaatctagcacataaagcccattactagaggtagaaatacaggcaatatactattacggcaacaaccatcaattacagttaagaatttttctgtaacaaccaaatggataatcaaatattgcaacaactcaagtattactgagcaaagtgcatttctacagtattcagtgttgctattcagttttctaacttaaaacagcctatgataactggcagcaaagaaggtccttgcaatagactgcctctgcttgagaacttatgatgtaattattgcatgctgctaatatactatctaaacattaaagatactcctaaaatatttgatggtagactatgattaagacattacactacaaaaaaaccttatgcagaaggaaatcctaactgacgtgcttctgcttt

SEQ ID NO: 671 - DNA, 114 bp, Homo sapiens
  misc_feature 6, 12, 49, 54, 60, 75, 78, 93, 104: n = A,T,C or G
tatgcnacaacncggacaacatcacccgggtgcagagcgacgtgttcanggtgncggagntccctcacggctacngtngctgtgacgatgatnccccgaggganaacctccgtg

SEQ ID NO: 672 - DNA, 177 bp, Homo sapiens
cctggtgctacagcaaaaacaacattccctactttgagaccagtgccaaggaggccatcaacgtggagcaggcgttccagacgattgcacggaatgcacttaagcaggaaacggaggtggagctgtacaacgaatttcctgaacctatcaaactggacaagaatgaccgggccaagg

SEQ ID NO: 673 - DNA, 439 bp, Homo sapiens
  misc_feature 124, 322, 404, 430: n = A,T,C or G
ccacagaagttgctgctggcgctctgggtgaagaatggaagggttatgtggtccgaatcagtggtgggaacgacaaacaaggtttccccatgaagcagggtgtcttgacccatggccgtgtccncctgctactgagtaaggggcattcctgttacagaccaaggagaactggagaaagaaagagaaaatcagttcgtggttgcattgtggatgcaaatctgagcgttctcaacttggttattgtaaaaaaaggagagaaggatattcctggactgactgatactacagtgcctcgccgcctgggccccaaaagagctagcanaatccgcaaacttttcaatctctctaaagaagatgatgtccgccagtatgttgaaaaccttaataaaagtagaactagacanaccccaaatacgtttgtctcctgctnaccaacgcg

SEQ ID NO: 674 - DNA, 168 bp, Homo sapiens
  misc_feature 44, 76, 88, 90, 94, 100, 108, 116, 123, 134, 164, 167: n = A,T,C or G
aaaggagttggaggagagggagggggaggacatggcaccattcnataaaccaaccttgttacaacaccatagccantatatttagttncntttnatctancatacaangaataacngggttanaaaaggtgtangcctataccctactcactccccaaggacanctna

SEQ ID NO: 675 - DNA, 406 bp, Homo sapiens
ccacagatgttgcagcccgtggtctggacattccttcaattaagactgtcattaactatgatgtggcacgagacattgatacccacacgcataggattggccgcacaggaagagcgggtgagaaaggtgtggcctataccctactcactcccaaggacagcaattttgctggtgacctggtccggaacttggaaggagccaatcaacacgtttctaaggaactcctagatctggcaatgcagaatgcctggtttcggaaatctcgattcaaaggagggaaaggaaaaaagctgaacattggtggaggaggacctcggccgcgaccacgctaagggcgaattccagcacactggcggccgttactagtggatccgagcggccacttgctatatggctactgtttcga

SEQ ID NO: 676 - DNA, 222 bp, Homo sapiens
aaagaataaagtctttgggaggtctcacggtgtagagaggagctttgaggccacccgcacaaaattcacccagagggaaatctcgtcggaaggacactcacggcagttctggatcacctgtgtatgtcaacagaagggataccgtctccttgaagaggaaactctgtcactcctcatgcctgtctagctcatacacccatttctctttgcttcacaggtttt

SEQ ID NO: 677 - DNA, 530 bp, Homo sapiens
  misc_feature 493, 511, 513, 516: n = A,T,C or G
ccacggctgcttccagctcctccctggagaagagctacgagctgcctgacggccaggtcatcaccattggcaatgagcggttccgctgccctgaggcactcttccagccttccttcctgggcatggagtcctgtggcatccacgaaactaccttcaactccatcatgaagtgtgacgtggacatccgcaaagacctgtacgccaacacagtgctgtctggcggcaccaccatgtaccctggcattgccgacaggatgcagaaggagatcactgccctggcacccagcacaatgaagatcaagatcattgctcctcctgagcgcaagtactccgtgtggatcggcggctccatcctggcctcctgtccaccttccagcagatggtacaagaggattacagtcgcctctctcacgaatgtttagcggattattattggtacaccttcttacaaactacttcgagaaacaaatagatggatgcttattgtttttgnttgttggttttttttggntnctnagatacctccgggg

SEQ ID NO: 678 - DNA, 582 bp, Homo sapiens
  misc_feature 409, 449, 468, 472, 477, 481, 513, 521, 526, 534, 535, 543,545, 547, 559, 562, 571, 574: n = A,T,C or G
ccttggaccggaaagggtacaatgccagggagtactacgaccacctgcccgagctgaagcaggccgtggaccagatcagcagtggctttttttctcccaaggagccagactgcttcaaggacatcgtgaacatgctgatgcaccatgacaggttcaaggtgtttgcagactatgaagcctacatgcagtgccaggcacaggtggaccaactgtaccggaaccccaaggagtggaccaagaaggtcatcaggaacatcgcctgctcgggcaagttctccagtgaccggaccatcacggagtatgcacgggagatctggggtgtggagccctccgacctgcagatcccgccccccaacatcccccgggactaggcatactgcttgcggacacggcattgtttttgtacttnactctttttcccaaccttgcaccgtggggtcctgttttgntccatgttcagagggcatngggnaggtngttnaagacaggaagaagattctaaatgtctatttntagaaccnattangtcaaagnnggactccngngnctcaagggattnccnttggcgctntgncactgggc

SEQ ID NO: 679 - DNA, 434 bp, Homo sapiens
  misc_feature 392, 428: n = A,T,C or G
cgaagatatgctcatgtggtgttgaggaaagcagacattgacctcaccaagagggcgggagaactcactgaggatgaggtggaacgtgtgatcaccattatgcagaatccacgccagtacaagatccccagactggttcttgaacagacagaaggatgtaaaggatggaaaatacagccaggtcctagccaatggtctggacaacaagctccgtgaagacctggagcgactgaagaagattcgggcccatagagggctgcgtcacttctggggccttcgtgtccgaggccagcacaccaagaccactggccgccgtggccgcaccgtgggtgtgtccaagaagaaataagtctgtaggacctcggcccgcgaccactaggcaatcaccctgnggcgtctatgatcactcgacactgctatatggctantgtttt

SEQ ID NO: 680 - DNA, 412 bp, Homo sapiens
  misc_feature 386, 396: n = A,T,C or G
cacctctcggatcagggcctctgacaccgcgtttgaagcatagcgttgcttgctgttcaccttgatcacggggcccttgtggaataaaggccggtggttctcctcatgcttgtccaggtagttgggatgcacagcatgggccatgtctgcgctgatcatgaaggacttgggtatggcttcctcgaaggctgtcgggtgctggcacgaggctgagatccgccgcagcaccagctctgtcagcagtgactgtgctccctgtgcactctcagaccccacctcttcgttgtcatagagtgtgaccatgcgcacgtgaggctctgtggacctgcccgggcggccgctcgaagggcgaattccagcacactggcggccgtttatgatcactngacaacttgngaatatggctagtgtt

SEQ ID NO: 681 - DNA, 192 bp, Homo sapiens
ccttgaagggacctcagagcaaaggaagagacctgggtgtggtgaggcatcccagggcatggaagggaccggttgtgctgtgggaatccactggcccctccttggttaaaaaagcacaacacatcatacatatttaccagaccagaagcgctggccccaagtctccccaacctggtcgggggaacctcctgg

SEQ ID NO: 682 - DNA, 458 bp, Homo sapiens
  misc_feature 130, 390, 431: n = A,T,C or G
ccaggcgctccttgtcggcatcagggagggtggccttgaactgctcatgggctgtggtcagtccctggatctcctcaatggtgtgcacaatgaaggtgtcctgcaggtcctccatggccccctccatcantttgttgaagggtgcagcccgcttggcatactccaagtacagctggtcaatggtctccagcagtttctcggtccgctccagagcttcccttcgcttctgagttagggcccccagattgtcccactggtcacagatcttttggcaacgggcgttgacactgggtgagtcataatagtccagctcattgagctcctgtgcgatggcggcaatctgctccacacggtcctggtgggcagccaggtcactcaagactcggcggnccctaggcaattcacacatgcggcttctatgatcgactcgnaccaacttgcgtatatggtatagtgtt

SEQ ID NO: 683 - DNA, 279 bp, Homo sapiens
aaaaaataatactgattttctgggaaaaacaaaaaaacaagccagagaagactgcccttcaaaccaaaatggtaagaaaggcagctatgaacatggggaagacaagtgtgaacatgaggaagacaggggatgaaaggtgtgaaaacagatgtgaggataagaagacaggtgtaaaggtgagaaagaggccgggcatggtggctcacgcctgtaatcccagctctgtgggaggccaaggcagatggatcatctgaagtcaagagttcgagaccagcctgg

SEQ ID NO: 684 - DNA, 426 bp, Homo sapiens
  misc_feature 74, 82, 89, 118, 123, 126, 128, 139, 146, 169, 185, 224,244, 260, 262, 276, 292, 299, 303, 327, 332, 356, 393, 396,416, 417, 422: n = A,T,C or G
aaagatgtctttttttattttacttttttttaagcaccaaattttgttgttttttttttctcccctccccacanatcccatntcaaatnattctgttaaccaccattccaacaggtcnagganagntnaaacaccttcntccctcngccttgggcctctttaatttttnattttttcgcatcagnattaatgtttttgcatactttgcatctttattcaaaagngtaaactttctttgtcaatntatggacatgcccatntntaaaggaaatgggngggtcaaaaagggatntcaaatnaagngataggggtcacaatggggaaatngaagnggggcataacattgccaaaatagngtgccactagaaatggggtaagctgcttttttttttnccnccggcgccttagggaattcnnccctngggg

SEQ ID NO: 685 - DNA, 497 bp, Homo sapiens
  misc_feature 128, 353, 373, 403, 406, 421, 424, 458, 459, 466, 470, 471,479, 482, 489: n = A,T,C or G
cctcaaaataagatgaaaaagtctcctgtgggtagctggtgttcctttttcaacttggggaaatcatcatctgtttctaaacgaaagctgcagcggaatgagagtgagccttcagagatgaaagccanggctctgaaaggtggcagggcagaaggaaccctccgttcagctaaaagtgaggagtctcttacatctctccatgcagttgatggtgattctaagctcttccgacccagaagacccagatcttccagtgatgcactgtctgcctcttttaatggagaaatgctggggaacccgctgtaactcctatgataatctgcctcatgacaatgagagtgaggaggaaggangggctgcttcatatccccancccttatctctcttcagtgagatgttgctnganccccaacattgatancanctggatttgatcatgtcattcaagtgttctctannctattanaatnntgaagcgngcntcttttnatcccaga

SEQ ID NO: 686 - DNA, 501 bp, Homo sapiens
  misc_feature 129, 357, 378, 403, 406, 417, 475, 482, 488: n = A,T,C or G
ccttgggtttccccagcacagcctcctgtcgctgcatgcgacgtgttgggatttttggatgaaagactctcccacgctctgttggtggacttagctgcctcactggaagtgatgtgggtggaaggtggnttgtattgttaccttttccacctctcattgttttccccagaacattgtagatgggggttggcagagggagaaataagccagccacggcagtcgcttggtttcccaggtggaatgggctaacacaggagatgatgggaacctgtcccgcagtccctgcatgaccattggccctgctggcctggcgatgtgggcatcctggggttcttagggtcccagaacaagccccangcaactggaacttgggtgganggaataggagataaactatgggttnagnataggccccantctatgctatctgcagagtggttgataaatgtactgccgcgcgtcaaggcaatcaganctcgcgnaatgancactcgcaacttg

SEQ ID NO: 687 - DNA, 447 bp, Homo sapiens
  misc_feature 367, 376, 384, 430: n = A,T,C or G
ccatggagtctatgagctggccgctcaccccgaagtcacacagcttgatctcccctctagagttcacgaggatgttggagggcttcacatctcggtgcatgatctggtgcttctctcggaggtacgccaagccccggagaaccgcgatgctgactttccccaggatctcctcgggaatcctcttggcctctttcagcacctggtccagggagccgccgtccatgtgttccatgcaaatgctgatctccccgtcactgtagaaggccccgtagaagcccacgatgtacggcgagttgcattcgtgcaggacctgcagctcgcggatgatctggttccggatggccggcttgatctcaaggtggatcanctttcctgntcggcggnccctagggcaattcaccatgcgcctctaggatcagtcgacactgcnatatgtatagtgttctg

SEQ ID NO: 688 - DNA, 454 bp, Homo sapiens
  misc_feature 413, 420, 429, 437: n = A,T,C or G
aaaaaagttccaacacacagccatgaggagcctcagttttgaaagaggtgcataataaaactactaaccagaggagtctatgccattttaagaaaaacaattaacctggttaaagagaaatgtcttatgtaaaataataaactaattgtggcttgtaaatgatttgtatgtgatcctgtcgactaaaatcacttaacaattctacaataagcttctgcatcaaagcctgccgcttgctctatgccggaataacaccaaatggaatctcctcatctcttgcttgttagcgatgtgtctgattcagggcatctgtctttttgttacttttttgtccgtgtcctctcatttgggttttgtaactgcaattttcaaaccaaattcctgccggggcgtcaaggcaattcccactgcgncgtctangatcactgnccactgcnaatatgctagtgttctg

SEQ ID NO: 689 - DNA, 526 bp, Homo sapiens
  misc_feature 383, 450, 471, 514, 518: n = A,T,C or G
ccagctatcagctgatcgtcttctgtctggacgctcgtcctgcttctgacatcaaaatcttctgtctcaaagtcagagtcatccaactcctcaggggtccttatcatcagcactgctttcctgatgtcccggatgccatcatataccaggcgggaagcatcgataaactcattctcatccatgggctgggcagggtccgagctgagggcttccacggctgcttctacttgctcagtaaaacgtggcatgactgtgttggagagcagcttagtggcttccagaaccttctctgtgtagactcctggctcatagttgtccatctctgaggtgactacgtgaatgacccgggctgcccggcctcgaattgcaccagctgtgcggcngctcaatctttttgaacaataaattgtactttcaaatggatcttgaacagcaaaagtataatggaanaatgcatcacagcatccgganacacggattgtttccatgttttactgcccggcggccgtcgaanggcnattcacca

SEQ ID NO: 690 - DNA, 468 bp, Homo sapiens
  misc_feature 402, 403, 422, 423, 437, 441: n = A,T,C or G
aaaaagaaggacttagggtgtcgttttcacatatgacaatgttgcatttatgatgcagtttcaagtaccaaaacgttgaattgatgatgcagttttcatatatcgagatgttcgctcgtgcagtactgttgggttaaatgacaatttatgtggattttgcatgtaatacacagtgagacacagtaattttatctaaattacagtgcagtttagttaatctattaatactgactcagtgtctgcctttaaatataaatgatatgttgaaaacttaaggaagcaaatgctacatatatgcaatataaaatagtaatgtgatgctgatgctgttaaccaaagggcagaataaataagcaaaatgccaaaaggggtcttaagaagaaattatttgtttcctcgcgnnccctagcaatccaccctgnngcgtctagtgatcnactngccacttgggatctggctactgtttcg

SEQ ID NO: 691 - DNA, 102 bp, Homo sapiens
cctacgcagccctctgtgcccagcagaacatctgcctcgactggcggaaccacacgcatggggcctgcttggtggagtgcccatctcacagggagtaccagg

SEQ ID NO: 692 - DNA, 407 bp, Homo sapiens
  misc_feature 348, 362, 390, 395: n = A,T,C or G
aaagtggttgccaggggattagggaagaaagggatgaacaggtgaagcatagagaagttttagggcagtgaaactattctgtatgattccataattgtagatatcatcatacatttgtctaagcccatacaatgtacaacaccagagtgaatcttcatgtaaactatggactttgggtgataatgatgtgtcaatggaggtttattgattgtaacaaatgtaccactctggtgtgggatactgatagtggtgggaggctatgcatgtgtgagggcaggggatatatgagaaatttctttttgtccacttttgctgtgaacctacaactgatttacctgcccgggcggncgctcgaaagggcngaattccacacactgggcgtctatgacnagtgnacaactgccaat

SEQ ID NO: 693 - DNA, 446 bp, Homo sapiens
  misc_feature 428: n = A,T,C or G
cctccaccatggccttcaagcagatggagcagatctctcagttcctgcaagcagctgagcgctatggcattaacaccactgacatcttccaaactgtggacctctgggaaggaaagaacatggcctgtgtgcagcggacgctgatgaatctgggtgggctggcagtagcccgagatgatgggctcttctctggggatcccaactggttccctaagaaatccaaggagaatcctcggaacttctcggataaccagctgcaagagggcaagaacgtgatcgggttacagatgggcaccaaccgcggggcgtctcaggcaggcatgactggctacgggatgccacgccagatcctcttgatcccaccccaggacctgcccggggcgtcaagcaatcacaactgcggcgtctatgatccactcgacagtgcnatatggctactgtttcgg

SEQ ID NO: 694 - DNA, 263 bp, Homo sapiens
gtgttagccaggatggtctccatctcctgatcttgtgatccacccacctcggcctcccaaagtgcttggattgcaggcgtgagccaccgagcccagcctcattaatgtgctttggaccttactagtgagacccacattttgccaccatccacttcatgttgacaggagccctggtctctgtcagccttatgtgtttatgctggagcctttcacttggttctgagtgatttgccaaagcatacagtttccacgtttggagattt

SEQ ID NO: 695 - DNA, 594 bp, Homo sapiens
  misc_feature 111, 327, 349, 379, 413, 440, 465, 466, 481, 490, 494, 520,538, 545, 552, 554, 562, 566, 581: n = A,T,C or G
ccattgctgtcgagggccccagcaaggctgagatctcttttgaggaccgcaaggacggctcctgtggtgtggcttatgtggtccaggagccaggtgactacgaagtctcantcaagttcaacgaggaaacacattcccgacagccccttcgtggtgcctgtggcttctccgtctggcgacgcccgccgcctcactgtttctagccttcaggagtcagggctaaaggtcaaccagccagcctcttttgcagtcagcctgaacggggccaagggggcgatcgatgccaaggtgcacagcccctcaggagccctggaggagtgctatgtnacagaaattgaccaagataagnatgctgtgcgcttcatccctcgggagaatnttactatgcgtcagtcaacggaccaatcctgaanccttcaatccagtgggactggcatganggaccaggttggtgttggttacganntgttgaagcgttacnggacccatnagtntctacacacaatcagaattggcctgngtgacttgcggcctcagngaaatgntgcaagntnctaggtcngctnccttccctgggctgnattctttttctaa

SEQ ID NO: 696 - DNA, 402 bp, Homo sapiens
  misc_feature 297, 324, 331, 351, 353, 361, 365, 370, 377, 386, 388: n = A,T,C or G
aaaacggtgtgtgttcggaggggtgaaagcattaagaagcccagtgccctcctggagtgagacaagggctcggccttaaggagctgaagagtctgggtagcttgtttagggtacaagaagcctgttctggtccagcttcagtgacacaagctgctttagctaaagtcccgcgggttccggcatggctaggctgagagcagggatctacctggcttctcagttctttggttggaaggagcacgaaatcagctcctattctccagtggagagatctggcctcagcttgggctagagatnccaaggacctgcccgggcggtcgctcnaatgggngaattccagcacacttggcngncgtactantttnattcnagttcgntaccctgtntntctttatactttct

SEQ ID NO: 697 - DNA, 162 bp, Homo sapiens
cctcaccctgccctcgcctagtctggaagctccgaccgacatcacggagcaaccttcaagcattccattacgccccatctcgctctgtgcccctccccaccagggcttcagcaggagccctggactcatcatcaataaacactgttacagcaaaaaaaaaaa

SEQ ID NO: 698 - DNA, 526 bp, Homo sapiens
  misc_feature 375, 382, 397, 404, 408, 478, 498, 503, 511, 522: n = A,T,C or G
ctcaaaagagcagctgctcttgtttttttcctctggcaacgagctggtcacatccggggcagtggtcgggtgcacgtgcttcatgatggtctggatccagttccgccgaatcccagatgtcatggcccgacagggtaaactcgccctcctttgtatgtatctggaagccatagtttctctgaactggatactctgtgacatcgtaacatgcggacaagtcaatttctccatccaagtcggctgcctcctcagccactgaatccctgtagtatctcaggctttgatcggcgaggacaaaccagtgtttcttccactggccgtcctcatacttgcttagtcagccagcctttcttgaaattcaacaggtcgggcgtnacggggntcctgactctgtcangattggntttngtgtgaacaggggaaccaagctctggaaaagactggggggcttattgggaagtcccttctaggacccctntttcctgcggccttggactnggcgnacacctanggcaatccacncact

SEQ ID NO: 699 - DNA, 549 bp, Homo sapiens
  misc_feature 34, 131, 150, 154, 160, 177, 197, 232, 238, 310, 322, 343,347, 348, 356, 364, 376, 377, 382, 387, 392, 395, 403, 405,411, 426, 429, 433, 437, 440, 453, 458, 463, 466, 468, 473,476, 481, 485, 487, 492, 496, 501, 504, 509, 516, 520: n = A,T,C or G
  misc_feature 523, 534, 538: n = A,T,C or G
aaaagaattaaataaaaacctgagaagtctaacntgaagctaggactcctgcctgcttcccttcaggcacctgctgtgcctccttctccgcagatgctctggttggaagcctcctgcactgcctttctgtncagcaccagctggactttncatnaaatgncacgagttctgggtgtntcctggtctgcagtccgcanctccctgccatcaggccacccgatctcacgatggnacagcngacaaactctgaggagcctcccaggagcctagggcttttcctccggcccttcttctgtaagcatactggacngcaagccccctngggatgttcactggggacagnacanngtggttanggggggcnagcttccactannaaggnggacnctccnctntgcatccnangggcanccctttgtcacttgngtntggngaantcntccccgtatcacnctctncggantancngtgcnagncttgnttgntnagagnctcngtggnttntgtcntgcaacncgcntangtatggttttnccgnctcctctacct

SEQ ID NO: 700 - DNA, 238 bp, Homo sapiens
  misc_feature 203, 211, 212, 216, 223, 225, 226: n = A,T,C or G
agccacatggatgctcacacactcacacctttgcacacacacacaagctggctcacagacacactgggggcccagatcctggtcattccccacaggtcttaataaaggttcatggaaggaaacctgtttcctaaggtagggtgggagtgtgtgtgagtgcgtgggggggagagggtgagagtgagtgtgtgcgtgtgcaacgngtgtgtgnntatntaggagnanngagtgattgggc

SEQ ID NO: 701 - DNA, 500 bp, Homo sapiens
  misc_feature 127, 260, 274, 287, 326, 381, 382, 384, 391, 415, 432, 439,441, 450, 455, 478, 479, 481, 490: n = A,T,C or G
cctttccatagctccacagcttcccacctcctccccaccaaaccggggttctagagttaaggatgggggagggtattatactgcctcagtctgactcctcaacccagcagcaatttgaggggatganggggaaagaaggactgccttttggaggcccccttcacctgcagctatgatgcccttccccttctcccctgtcctcaccatatgccttatccccattctactcccctgctatgcaagtgcccctgtggcttgtncccaaccccctcancaacaaagctcanctggggaaccagagtaatttgaagaatgcttgaagtcancgtcttccattccagaaagacccccattcttcctttgggggtatgatggtggaanntnttacccngaccacatgagagagattaacagnggctattcaagggcctnctgcttnanaagactgtnggtgncgtaatgggaatccacacactgnngngtctaggancagctgtaca

SEQ ID NO: 702 - DNA, 452 bp, Homo sapiens
  misc_feature 389, 422: n = A,T,C or G
aaaaaagttccaacacacagccatgaggagcctcagttttgaaagaggtgcataataaaactactaaccagaggagtctatgccattttaagaaaaacaattaacctggttaaagagaaatgtcttatgtaaataataaactaattgtggcttgtaaatgatttgtatgtgatcctgtcgactaaaatcacttaacaattctacaataagcttctgcatcaaagcctgccgcttgctctatgccggaataacaccaaatggaatctcctcatctcttgcttgttagcgatgtgtctgattcagggcatctgtctttttgttacttttttgtccgtgtcctctcatttgggttttgtaactgcaattttcaaaccaaagtactcggcggnccctaggcaatcaccctgcgcgtctatgatcantcgacactgggaatctggctgtgtttctgg

SEQ ID NO: 703 - DNA, 286 bp, Homo sapiens
cctgcatgctccgctgcttccgccagcaggagaatcctcccctgccccttggctcaaaggtggtggttctggcggggctgttcgtgatggtgttgatcctcttcctgggagcctccatggtctacctgatccggggtggcacggaggaaccaggagcgtgccctgcgcaccgtctggagctccggagatgacaaggagcagctggtgaagaacacatatgtcctgtgaccgccctgtcgccaagaggactggggaagggaggggagactatgtgtgagcttttttt

SEQ ID NO: 704 - DNA, 515 bp, Homo sapiens
  misc_feature 370, 382, 420, 426, 450, 452, 463, 472, 485, 492, 507, 510: n = A,T,C or G
aaaaaataaagattcaggcactgactcaggaagacatgttcagctgggtcaagattttgtttcccctgaccagataaaagactctaacaacatacggtgtgtcagcttcttctttgcccaactcagagaaagtcatataaaggagaaaaagaaaacatgcttgaaaacacagtgaccaaaggatttgaagtaataattacattaaataaccataacttttcatttaactattcacattccacacagtggaaattatcctctcctccagatttttcacttacactcttaactttgaagacctacagtaacaaaaaacaacttacagacttccaggatgtgtgtttttttcttttaatgccaagcacaaagngtcatcataaanattttgtgttgatatttattgatgacagaccaattttnctaaanttcttatatgaatttatctctatntnataaatgtaantgtttatantgaacccttgctntattgcntgaacaattctctgntgntctag

SEQ ID NO: 705 - DNA, 547 bp, Homo sapiens
  misc_feature 381, 396, 458, 492, 515, 531, 537: n = A,T,C or G
ccaggtctgtggtcctttccagtctgtcccagagccctggtgggaacagctctacacctcttaccttagaactggccatccctgggcagcagggccagtgtcacctgctgacctctagtatttcctttgcccagaactagagtcatgatagctgagggtcactcgccctgcaagagtcactaggcacccaccatgccaataaggctctccgctggctccctgcagttggctgggtgtttaatagtcactgaaaactcccagccctgctgcacactagaggcaggtcctctcggtcctctccatcctgtgcttctgtggcccccagcaagctcaccgcctccttggaggagagagacatacaaggacaagtgggtcatgggnacacctaaatcaagntatataacattgatatgctatgttttaaggtttttaatcttatatgatatattcatttatantcaggtataagaaatggctctttatattataganctatgtaattgacattttacctngccggacacctagggnaatcanacctggggcc

SEQ ID NO: 706 - DNA, 459 bp, Homo sapiens
  misc_feature 383, 407, 427, 444: n = A,T,C or G
cctcctccagcagcagtgttgagtagttctgggcttggcccttgaagtgccgggtcccagagagctcttcatagggtatggtcatccgaggggtggcatctagttctctagacggtctccgcagtgagggtcctgggactgcagttgctgtgaggatgctgaggaggaggggccagagcctcccccacatcttcctggggaggcccagactaacaagacccccaaagggagccagagtcacaggttgtgggggcggggaatgggaagcacagtcacaggggtcaaagtccaaggaagtcacttggaaggtcaggggtcataaggtcataggagtcaaggaatcatggggccatggggggtcctggaatcggggggacatggancaggttgtgactcgcgaccctagncaatcaccctgcgcgtctangatcactcgccactgcnatatgcatatttctg

SEQ ID NO: 707 - DNA, 454 bp, Homo sapiens
  misc_feature 240, 274, 403, 409, 412, 433, 437, 440: n = A,T,C or G
ccttcgtgaactgtgacgagaacagccggcttgtctccctgaccctgaacctggtgaccagggctgatgagggctggtactggtgtggagtgaagcagggccacttctatggagagattgcagccgtctatgtggcaagttgaagagaggaaggcagcggggtcccgcgatgtcagcctagcgaaggcagacgttgctcctgatgagaaggtgctagactctggtttccgggagattganaacaaagccattcaggatcccaggctttttgcanaggaaaaggcgatggcagatacaagagatcaagccgatgggagcagagcatctgtggattccggcagctctgaggaacaaggtggaagctccagggccgctggtcttccctgtccctgcctgtctgagnggaccnggnttggggggactcccgcggcgncaanggnaatcaccatgcggc

SEQ ID NO: 708 - DNA, 472 bp, Homo sapiens
  misc_feature 134, 150, 186, 191, 195, 202, 256, 268, 284, 304, 311, 343,355, 367, 374, 376, 388, 432, 435, 452, 464: n = A,T,C or G
aaacatttactaagacagtacctattaggaaaaccaaatattgcaaatggtcaattcgattttaatttctcaaaagatactctgttatccagaagattaaaatgcctacattgagtgcttaaaaaaaaaaacanctgtgatgattgtgancaaaatggcaagtaagttaagcatttttgatcctgnaatcntggnatcattncaatgaaaggaattcacaaactactgccaaaggaagtttgttttttaatttaanagggaaatatancctataaatttgtttnttccaagcttagctcttaantttgganactcaaagttaaacatcctcaacagagttttntttataattttnaattgtcaattngaatttngntactgatctggnacctttacttctcttggagttacattaatgaaatacccttaaanacnaaaatgctatctgggtnatgtcttctgtngaaatact

SEQ ID NO: 709 - DNA, 411 bp, Homo sapiens
  misc_feature 187, 224, 237, 240, 246, 249, 255, 261, 263, 330, 335, 338,372, 373, 374, 382, 388, 392: n = A,T,C or G
aaaatcacaaacattaacggcagtaggcaccaccatgtaaaagtgagctcagacgtctctaaaaaatgtttcctttataaaagcacatggcggttgaatcttaaggttaaattttaatatgaaagatcctcatgaattaaatagttgatgcaatttttaacgttaattgatataaaaaaaaaaacancaaaattaggcttgtaaaactgactttttcattacgngggttttgaaatntanccccanacntactgngttgananatacttaaagggagggagtaggttttgaaaaggttgatggtggtggggagggaaggacctcggccgngaccnctntaagggcgaattccagcacactggcggccgttcnnnggggatcnctcggncaanttgctatctgcttctgttc

SEQ ID NO: 710 - DNA, 418 bp, Homo sapiens
  misc_feature 343, 366: n = A,T,C or G
ccaccgggatagccgggggtctggcaggaatgggaggcatccagaacgagaaggagaccatgcaaagcctgaacgaccgcctggcctcttacctggacagagtgaggagcctggagaccgagaaccggaggctggagagcaaaatccgggagcacttggagaagaagggaccccaggtcagagactggagccattacttcaagatcatcgaggacctgagggctcagatcttcgcaaatactgtggacaatgcccgcatcgttctgcaggttgacaatgcccgtcttgcttgctgatgactttagagtcaagtatgagacagagctggacctgcccgggcggnccgctcgaaagggcgaattccancacactgcgggcggtactgatcactcgtccactgctatctggctactgttcg

SEQ ID NO: 711 - DNA, 526 bp, Homo sapiens
  misc_feature 121, 281, 352, 372, 394, 395, 398, 435, 443, 452, 487, 508,516: n = A,T,C or G
ccatctccagctgctcatctggggtcccaagcttttccttcagggccagcatgaccgctgggaggatcacgccaagatgacgggtgagggcatcaccagccactgacgaaaggaaagccancacccggtggttgacaggtggcgttgtcaagcttgggcacaaggtagggcagcaccacacgactcttaatagccatgacttgcttcagaccatccaaggcaaactctgacacctcctcgtcatccagctgctttagtaaaaatgggagaatgtcctccanagcctggtggccgatgggtggaatgcaacttgctcgaaagtcttggcttgccgctctctgacctcctccantgggtcacacaaaagccttncttgccgtgggcacaggattannaancacacggatccggtgggattatattactagcatgacnacctgctntatcgtttntaactagactggcggacacctaggcaatcagacantgcgcgtatatgtccagtcgnccactgcnattggctact

SEQ ID NO: 712 - DNA, 362 bp, Homo sapiens
  misc_feature 299, 317: n = A,T,C or G
cctcgcccgatgtgtaggaagaggcagataaagaatattggggcgccattggcgtgaaggtagcggatgattcagccataatttacgtctcgagtgatgtgggcgattgatgaaaaggcggttgaggcgtctggtgagtagtgcatggctaggaatagtcctgtggtgatttggaggatcaggcaggcgccaaggagtgagccgaggtttcatcatgcggagatgttggatggggtgggtaggtcgatgaatgagtggttaattaattttattagggggttaatttttgcgacctcggncgcgaccacgctaagggngaattccagcacactggcggccgttactagtggatccgagctcgg

SEQ ID NO: 713 - DNA, 307 bp, Homo sapiens
  misc_feature 134: n = A,T,C or G
aaaaaagaaacgagaagggctctgcgagggagacgccacaaaccaagcttggaaagcaaaatcatttttgtttctctttggcaacaacaataacgaggaatctttttagtaaaatgaagctaaagctttctccntacagaagaacagacatgcaccaaacttgttagtatggacagttgtgtgtgagaaggagaaggagggagagaaacctatggataatataaattagaagtcattgaaggtggggaggaaaaaaatcctacaaaatttaagaacatttcagaacaggtaaacaattgtgtacttt

SEQ ID NO: 714 - DNA, 503 bp, Homo sapiens
  misc_feature 395, 444, 448, 452, 468, 473, 481: n = A,T,C or G
ccaagtcgcactccacattagagtttgcctatcaggtcttatttgatccacaatcttccttatttggggttcaaagcccataccaagcattctatctgcttcatcaaggacaaggtaggttgttcttctcagattggtttttccacactctaaaaagtcaatcagtcttccaggtgttgcaatacagatttccacacctctctccaaatcacgtatttgtggtcccttaggagcaccaccgtagatacaagtagacttcaagcgacatgctctacaatattcagcagctacttgctgcacctgttgggccaagttcccgagttggtgccagcaccaaacaaataggcccatcgcctctctctaggaatggcttgatgattgatggcatgcagaanaataacatgttccaatcattggcctccaccttcatcctaacactgactngcgnaccntaaggcatcaccatgnggctntaggacantgacaactgctatatgcaagtg

SEQ ID NO: 715 - DNA, 433 bp, Homo sapiens
  misc_feature 141, 302, 305, 370, 371, 389, 395, 422, 427: n = A,T,C or G
ccaggatcctatgcgacaacgcggacaacatcacccgggtgcagagcgacgtgttcagggtggcggagttccctcacggctacggcagttgtgacgagatccccagggtggacctccgggtgtggcaggactgctttgaanactgtaggaccagggggcagttcaatgccttttcctatcatttccgaggcagacggtctcttgagttcagctaccaggaggacaagccgaccaagaaaacaagaccacggaaaatacccagtgttgggagacagggggaacatctcagcaacaggcacctnagncttcagcacacgctcagatgcattctgggacaaatgacttcaagagagttttgttctggaaatgnngataccattcacttactngaccanataagaattgatacggtagaccgatcncgatncggcta

SEQ ID NO: 716 - DNA, 500 bp, Homo sapiens
  misc_feature 411, 418, 448, 464, 466, 486, 495: n = A,T,C or G
aaagtacattatgagaacaacagccctttcctgaccatcaccagcatgacccgagtcattgaagtctctcactggggtaatattgctgtggaagaaaatgtggacttaaagcacacaggagctgtgcttaaggggcctttctcacgctatgattaccagagacagccagatagtggaatatcctccatccgttcttttaagaccatccttcctgctgctgcccaggatgtttattaccgggatgagattggcaatgtttctaccagccacctccttattttggatgactctgtagatatggaaatccggcctcgcttccctctctttggcgggtggaagacccattacatccgttggctacaacctccccaagctatgagtaccttatttggtgacgttgcctgaatagtnggacatngttatacaggtgatctctgctggaatatcnctgaggagcaaacttnantgtgtccttgaatatcggcnaaaggctgntccta

SEQ ID NO: 717 - DNA, 341 bp, Homo sapiens
ccttcatcctcctccccagctcttctcttcctagatctgcaggctgcacctctggctagagccgaggggagagagggactcaagggaaaggcaagcttgaggccaagatggctgctgcctgctcatggccctcggaaggtccagctgggcctcctgcctccgggcaggcaaggtttacactgcggaagccaaaggcagctaagatagaaagctggactgaccaaagactgcagaacccccaggtggcctgcgtcttttttctcttcccttcccagaccaggaaaggcttggctggtgtatgcacagggtgtggtatgagggggtggttattggactccagg

SEQ ID NO: 718 - DNA, 445 bp, Homo sapiens
  misc_feature 337, 408, 414, 417, 420, 432, 435, 442: n = A,T,C or G
caggatttcttcacgcctctcagtccctcacaagacagctgtctcaggcttttcaagctgtgagagacacatcagagccctgggcactgtcactgcttgcagcctgagtgtaactccctccttttctatctgactcttcctcctccacatcacggcagcgaccacagctccagtgatcacagctccaaggagaaccaggccagcaatgatgcccacgatggggatggtgggctgggaagacagctcccatctcagggtgagggacttgggcagaccctcatgctgcacatggcaggtgtatctctgctcctctccagaaggcaccaccacagcccgnccacttctggaaggttccatcccctgcaggacctgcccgggcggcctagcaattcagcatggggcgtctantgatcnaantgnccaacttgctantcntgcatantgt

SEQ ID NO: 719 - DNA, 411 bp, Homo sapiens
  misc_feature 129, 296, 318, 358, 361, 367, 368, 375, 399, 403, 407: n = A,T,C or G
aaatgctgcggtttggtcaatggagctgctgattggggaaataattttcaacactatcctgaattatgtgcctgtctagataagcagagaccatgccaaagctataatggaaaacaagtttacaaaganaccctgtatttctttcataaaagacttcttggcaaaaaatttgattatagttattggaatatcatttggactggcagttattgagatactgggtttggtgttttctatggtcctgtattgccagatcgggaacaaatgaatctgtggatgcatcaacctatcgtcangtcaaacccctttacctgcccnggcggccgctcgaaagggcgaattccagcacactggcggncgnttctannggatccnagctcggtaatcttccgctctggnatantgtncgtg

SEQ ID NO: 720 - DNA, 453 bp, Homo sapiens
  misc_feature 381, 385, 410, 438, 441, 442: n = A,T,C or G
ccaatatcttagaggtgtgtcgcagcaaacatatgcccaagtcaacgattgagacagcactgaaaatggagaaatccaaggacacttatttgctgtatgagggtcgaggccctggtggctcttctctgctcatcgaggcattatctaacagtagccacaagtgccaagcagacattagacatatcctgaataagaatggaggagtgatggctgtaggagctcgtcactcttttgacaaaaagggggtgattgtggttgaagtggaggacagagagaagaaggctgtgaacctagagcgtgccctggagatggcaatcgaagcaggagctgaggatgtcaaggaaactgaagatgaagaagaaaggaacgttttttacctgnccgngcgtcaaggcaatcaccctgcggcngtctatgatcagtcgtccacttgctatntgnntactgtcctgg

SEQ ID NO: 721 - DNA, 378 bp, Homo sapiens
  misc_feature 251, 308, 311, 319, 331, 347, 353, 359, 365, 369, 375: n = A,T,C or G
ggatgatgaggaagggatggtgacaggaagagaggtggcgtgacctgtggatactgaggaagtgttggtgacaagaagaggggtggtgtcacctgtggatactgaggaaaggctggtgacaggaagaaggggtggcctgacctgtggatgctgaggaagtgtccgtgacaggaagacgggtggtgttacctgtagatgctgaggaagtgctggtgacaggaacaggggtggcgtgaccggtggatgctgangaagtgctggtgacatgaagagacctgcccgggcggccgctccgaaagggcgaattncancacactgncggccggtctantggatcccagctcggntcccancttgcntaatcntggncatagnttt

SEQ ID NO: 722 - DNA, 176 bp, Homo sapiens
  misc_feature 128: n = A,T,C or G
ccaacgggggcatccactacatcacccttgatggccgtgtctacgacctgcatggctcctgctcctatgtcttggcccaagtctgccacccaaagcctggggacgaggacttttccatcgtgcttganaaagaatgcagctggagatctccaacgcctcctggttactgtggctgg

SEQ ID NO: 723 - DNA, 339 bp, Homo sapiens
  misc_feature 330: n = A,T,C or G
aaaaagaaaaaaaaagccaaatacattttctgacattgtaagattgccttactgtctgtcattccttattgctggcccctttctcaggccggaggccaagtggtggagaaggaaaggaaatgatcgaaccgggcatgttgtcaagtgggcatgccactgggaaataccaccagtttaccctgaaacattgtcctcagaggagtaggaaagtggattttgaatctctattttgctcaaaagttcagttcctgagatactgatgactgagagtgctgctgggaaattttcaggattgtgtggtcttttggggttttttgttttttttttttnaaaaaaaag

SEQ ID NO: 724 - DNA, 559 bp, Homo sapiens
  misc_feature 383, 454, 455, 478, 504, 508, 516, 521, 522, 529, 538, 540,545, 551, 555: n = A,T,C or G
ccaccacacccaattccttgctggtatcatggcagccgccacgtgccaggattaccggctacatcatcaagtatgagaagcctgggtctcctcccagagaagtggtccctcggccccgccctggtgtcaccagaggctactattactggcctggaaccgggaaccgaatatacaatttatgtcattgccctgaagaataatcagaagagcgagcccctgattggaaggaaaaagacagacgagcttccccaactggtaacccttccacaccccaatcttcatggaccagagatcttggatgttccttccacagttcaaaagacccctttcgtcacccaccctgggtatgacactggaaatggtattcagcttcctggcacttngcagaccatgtggaaaatatttgagaatggttagcgaccccgcaacgcccctagaagcaactccgcatgannaacttttaaacttatggcatcgncttatcttttgtcttgctgtaaactngagnttgattcngcttnngctgganctagatacntngttgncattcntgantgtg

SEQ ID NO: 725 - DNA, 571 bp, Homo sapiens
  misc_feature 483, 520, 523, 535, 538, 539, 549, 558, 563, 566: n = A,T,C or G
ccacagcaggactacagtcaagacaatcacagtctctgcggagctgcccaagccctccatctccagcaacaactccaaacccgtggaggacaaggatgctgtggccttcacctgtgaacctggagggctcagaacacaacctacctgtggtgggtaaatggtcagagcctcccagtcagtcccaggctgcagctgtccaatggcaacaggaccctcactctattcaatgtcacaagaaatgacgcaagagcctatgtatgtggaatccagaactcagtgagtgcaaaccgcagtgacccagtcaccctggatgtcctctatgggccggacacccccatcattgtccccccagactcgtcttacctttcgggaagcgaaacctcaacctctgcctcggcttaccatcccgagattttggcgatatggatccgacacacaccaagtctctttcgcaaataccaataatacggacttcctgtttgntctactggtctgcgaatattcatagtagacatacatnttnatttgacttttntgnnttagtgggcnctgtggatntgatngangtggt

SEQ ID NO: 726 - DNA, 477 bp, Homo sapiens
  misc_feature 144, 280, 347, 375, 384, 404, 411, 414: n = A,T,C or G
aaagcgtggggttttttaatctctgccacccttgtcaagggagtcttgtaaagttgccgagggtaggttcatctccaggtttcgggattcccatccgtcctggcgatcctgccagcagtgggtgggcaagcctgagctccctcnggctcgcctgccagcctggagttcttcctgtgctccttgatcacctgagctgcctcagattccatttggtcctctccttcctggaaggcttccttttatgttttgttttaatcccaaatgtctgaatgttttgcantgtgtaggggtttgagctccttgttcattctccttcctttttcctcccgcttccctctccatgaagngattctgttgacaataatggatactgcncattccctntggtattgaaattttggttntcgagtnatnaaatgctaacggatgttattgaaaaacaggggtactgcggcgcctcaaggcaatcaccctgcg

SEQ ID NO: 727 - DNA, 168 bp, Homo sapiens
aaagaattttaatacaaacttaatataaactatttcagtccctcttaacatgtaagacactgactcaaaatacttttataccgtttttttcaagtattgcacaatataggtacaaaattaatatttacgattaccatttttcttccataatatatagcaaaaatcttt

SEQ ID NO: 728 - DNA, 564 bp, Homo sapiens
  misc_feature 391, 419, 427, 446, 462, 476, 491, 495, 502, 511, 514, 526,533, 536, 546, 551, 558: n = A,T,C or G
ccacgaccctttgtactgtcaactctggcttcctttacaagaaactaggagcacttctagcacattccttccttaccctgctctctcaaaaccaccctgacccccatggcccctcctggaaacatggtactcagaaaagcagggaccaccagcggctggcaaagtgtttggggaaaaaaggaggtgcaaagtcagcaagaaaacaaatgcccgctggtcccgccaaggcagggtatgcctagtcccgggggatgttggggggcgggatctgcaggtcggagggctccacaccccagatctcccgtgcatactccgtgatggtccggtcacttggagaacttgcccgagcaggcgatgttcctgatgaccttcttggtccactctgggtcgnacagtggtcacttcctggactgatgagnttatgttnaaacacttaactgtatggngatagctgtcacatgncttgaacatctggncttggagaaaaaccntgtnattgtcncgctgttanttngcaggggctaanctcctgnttnccttcggcangactngcggacncttagg

SEQ ID NO: 729 - DNA, 253 bp, Homo sapiens
  misc_feature 42, 146, 194, 226, 229, 245: n = A,T,C or G
aaagaataaagtctttgggaggtctcacggtgtagagagganctttgaggccacccgcacaaaattcacccagagggaaatctcgtcggaaggacactcacggcagttctggatcacctgtgtatgtcaacagaaagggatacccntcttcctttaaagaggaaaactctgtcactcctcattgccctgtctangctcatacacccatttctcttttgcttcacanggntttacctcgggcccgngaccaccc

SEQ ID NO: 730 - DNA, 291 bp, Homo sapiens
aaaacttacttcaaatttaatttagactcagtaggtaagcaacattcagaatatgaatatgggaatgacttgagtttgagtacagatactcgacaccaaaaaagtcatactacaatgaattcctatgaatgttatcaatgtgggaaaagccttctgccgaagttcatcccttattcgacatcagatcattcacacaggagagaaaccctataaatgcagtgaatgtgggagattcttcaacccgacgtacaaaccttactaagcatcaaaaacttcatgctgaagcaaagg

SEQ ID NO: 731 - DNA, 197 bp, Homo sapiens
  misc_feature 118, 143, 150, 153, 157, 161, 168, 172, 174, 180, 184, 188,192: n = A,T,C or G
cctgagtgggggacttgcaagggctgatgggtaacccctcccacctgctgctactccctgccccaaaaagcagcttggctcacaagcctgggcatgcagggcagcacgaggagctgancagggagtgtgggggtggaaaaaanccccccnctncctnccanggggcanaagnanaacaangggnatcncccnaacat

SEQ ID NO: 732 - DNA, 203 bp, Homo sapiens
  misc_feature 147: n = A,T,C or G
ccacacctgcagagggagacatcggagccgtctttgggcttggcttcccgccttgtctgggagggcctttccgctttgtggatctgtatggcgcccagaagatagtggaccggctcaagaaatatgaagctgcctatggaaaacaanttcaccccatgccagctgctagctgaccatgctaacagccctaacaagaagttcta

SEQ ID NO: 733 - DNA, 512 bp, Homo sapiens
  misc_feature 263, 267, 309, 334, 346, 376, 401, 426, 430, 442, 456, 459,470, 478, 490, 503, 510: n = A,T,C or G
ccacccagtactttgctgacagggacatgttctgtgctggccgagtacctgaggaggatctgaagaggacaatgatggcctgtggaggctcaatccagaccagtgtgaatgctctgtcagcagatgtgctgggtcgatgccaggtgtttgaagagacccagattggaggcgagaggtacaatttttttactggctgccccaaggccaagacatgcaccttcattctccgtggcggcgccgagcagtttatggaggagacagancggnccctgcatgatgccatcatgatccgtcaggagggccatcaanaatgattcactggtggctggtggcnggggccatttanatggaactctccaagtaccttgcgggattnctcaaggactattccaggaaaacancaactttttgattggggcatatgcncaangaccttgggcgngaacaccccttaanggnggaaatttcancacacttngcggggccggtnactttgtgggatnccaactntg

SEQ ID NO: 734 - DNA, 180 bp, Homo sapiens
  misc_feature 168: n = A,T,C or G
cctatctggttggcctttttgaagacaccaacctgtgtgctatccatgccaaacgtgtaacaattatgccaaaagacatccagctagcacgccgcatacgtggagaacgtgcttaagaatccactatgatgggaaacatttcattctcaaaaaaaaaaaaaaaatttntttttttcctgt

SEQ ID NO: 735 - DNA, 302 bp, Homo sapiens
ccttggcatctctagcccaagctgaggccagatctctccactggagaataggagctgatttcctgctccttccaaccaaagaactgagaagccaggtagatccctgctctcagcctagccatgccggaacccgcgggactttagctaaagcagcttgtgtcactgaagctggacagaacaggcttcttgtaccctaaacaagctacccagactcttcagctccttaaggccgagcccttgtctcactccaggagggcactgggcttcttaatgctttcacccctccgaacacacaccgtttt

SEQ ID NO: 736 - DNA, 463 bp, Homo sapiens
  misc_feature 317, 352, 375, 382, 386, 410, 432, 435, 458: n = A,T,C or G
ccagtgtaattgttccaacaaagggaacctactttggtgcccgaggaaatggctgtttgtgatgctggggaaaagtcaagatgctgacgcctaatggctgttctagcctttccaggtttgtaacatgaagatggggaaggaaatggcaccactgctgtttgtaatctgaggaactcttggcagcattcactctccaaagcagtacaaaacttacaaagaagtcaaaagtcttaacactcccattctccaggaactcttgtctgtgtcatctggtaggagggaggaatcctggttccctcaggtccttgtcatgttanctttttgatagcttcaatccacttcgctcgctcanccttcttgctggccctgaatgtnaataacngtgnggcaatccttagaaatcacctttngaagaaggttttcccttggacnttncctttaaacccccagtggggaancggcc

SEQ ID NO: 737 - DNA, 344 bp, Homo sapiens
ccttggtcaggatgaagttggctgacacagcttagcttggttttgcttattcaaaagagaaaataactacacatggaaatgaaactagctgaagccttttcttgttttagcaactgaaaattgtacttggtcacttttgtgcttgaggaggcccattttctgcctggcagggggcaggtctgtgccctcccgctgactcctgctgtgtcctgaggtgcatttcctgttgtacacacaagggccaggctccattctccctccctttccaccagtgccacagcctcgtctggaaaaaggaccaggggtcccggaggaacccatttgtgctctgcttggacagcagg

SEQ ID NO: 738 - DNA, 589 bp, Homo sapiens
  misc_feature 387, 427, 444, 453, 474, 489, 491, 499, 515, 516, 519, 554,562, 567, 578, 579, 589: n = A,T,C or G
catgatgtcaggctcggcaacaggctccttgttgacactcaccacattgtttttcaagctgacttccagcttgtcaccttggagagactttagccgcaccagggccccgatgcctccgctaaccaggatttcatcaccaatgtggtatttcaggatgttggcaagttccttggcatctcccaagagtctgctccgttctcttggtggcagggctcggaaggcttcatttgtgggagcaaagactgtgtagactccttcccggttgagggtctccgtcagtcctgcagactggatggcagctaccagcatgctaaagcgattgtctcccttcaggacatccatgacagtccccattgggggggtcagcacccggtccatcgtgaacanggtcccgtacctccccctcttgtcgtgggccgcgatgcanctgttcttaatgcagangctattacnataaaacaaaaaacttctcanttttttgccccccananttttccangggtcttgtccatggnncanaatacttaaaaggccagctgggcttttaattatgnggggtccnaaaanaaaattccttnnattgggcatn

SEQ ID NO: 739 - DNA, 341 bp, Homo sapiens
aaagttctttatagggttagggtgtgggaaaatgctatattaataaatctgtagtgttttgtgtttatatgttcagaaccagagtagactggattgaaagatggactgggtctaatttatcatgactgatagatctggttaagttgtgtagtaaagcattaggagggtcattcctgtcacaaaagtgccactaaaacagcctcaggagaataaatgacttgcttttctaaatctcaggtttatctgggctctatcatatagacaggcttctgatagtttgcaactgtaagcagaaacctacatatagttaaaatcctggtctttcttggtaaacagatttt

SEQ ID NO: 740 - DNA, 313 bp, Homo sapiens
aaactttataagtatgattataatagtggagaagaattagaatcctacaagggacactttggtcctattcactgtgtgagatttagtcctgatggagaactctatgccagtggttcagaagatggaacattgagactatggcaaactgtggtaggaaaaacgtatggcctttggaaatgtgtgcttcctgaagaagatagtggtgagctggcaaagccaaagattggttttccagagacaacagaagaggagctagaagaaattgcttcagagaattcagattgcatctttccttcagctcctgatgttaagg

SEQ ID NO: 741 - DNA, 589 bp, Homo sapiens
  misc_feature 366, 392, 401, 516, 530, 551, 554, 585, 589: n = A,T,C or G
cggtgcaccgggaagagtcgtgcagcgactccggcaccaagtgctcctccacccctgataacttgagccggactcagtcaggctccagcctgtccttggcctctgcggcgacgacagaacccgagagcgttcattccgggggcacaccctctcagcgagtggaatcgatggaagccctgcccatactgagccgtaacccaagcaggagcacagaccgagactgggagaccgcgtcggcggcatcttccctggcctcagtggccgagtacacaggtcccaagctctttaaggagcccagtagtaaatcaaacaagccgattattcacaatgccatatcccattgctgcctggctggaaaagtgaacnaaccccacaagaattccatattggangagctgganaagtgtgatgccaatcactacatcatactgtttcgtgatgctggcttgccagttcaaggcgcttttactgctactatcctgatactgaggaaaatctacaaactcacttggcacngggcccaaagaacnttcaccaagaaaatgatcganaanctggataaatacaggttcagacccaaaacantttn

SEQ ID NO: 742 - DNA, 205 bp, Homo sapiens
ccaatccagtccttcagaccctgcctgaaacttgtatcttacgtgaacttaaagaataaaatgcatttctaccccgatctcgcccccaggactggcacgacaggcccacggcagattagatcttttcccagtactgatcggtgcgtggaattccagccaccacttctgattcgattccacagtgatcctgtcctctgagtatttt

SEQ ID NO: 743 - DNA, 369 bp, Homo sapiens
  misc_feature 304, 317, 323, 342, 344: n = A,T,C or G
cctgggctgggaaaaactttggaaccagactcttgcctgtttcccaggcccactgtgcctcagagaccagggctccagcccctcttggagaagtctcagctaagctcacgtcctgagaaagctcaaaggtttggaaggagcagaaaacccttgggccagaagtaccagactagatggacctgcctgcataggagtttggaggaagttggagttttgtttcctctgttcaaagctgcctgtccctaccccatggtgctaggaagaggagtggggtggtgtcataccctggaggccccaaccctgnccttcccgagctnctcttncatgctgtgcccccagggntnggaggaaggacttccctgcttagtt

SEQ ID NO: 744 - DNA, 207 bp, Homo sapiens
  misc_feature 85, 116, 136, 153, 154, 161, 165, 171, 176, 178, 189, 190,198: n = A,T,C or G
cctgggtggtggagcgaatgggccgattccaccggatcctggagcctggtttgaacatcctcatccctgtgttagaccggatccnatatgtgcagagtctcaaggaaattgtcatnaacgtgcctgagcagtcggntgtgactgtcgacaatnnaactctngcanaatccntggantnctttacctgcnncatcatgngacccttac

SEQ ID NO: 745 - DNA, 282 bp, Homo sapiens; identical to SEQ ID NO: 397

SEQ ID NO: 746 - DNA, 211 bp, Homo sapiens
  misc_feature 88, 129, 154, 157, 162, 165, 168, 174, 193, 195, 204: n = A,T,C or G
aaaagaattaaataaaaacctgagaagtctaacgtgaagctaggactcctgcctgcttcccttcaggcacctgctgtgcctccttctncgcagatgctctggttggaagcctcctgcactgccttctgnaacagcaccagctgggacgttgtcnatnaaaangtnacnaccttntgggtgttttctggtctgnantctggagantccctgc

SEQ ID NO: 747 - DNA, 359 bp, Homo sapiens
cagagatggtttgtccatttgtccactgagaaattagaaactagggacaagggggaggaaaagtactgaaatacagtttatgaagcaagtgtgtctcgggctgtgcttgtcccaggagccccagcagcatctgaactgaggcttcttcagtcctgcaggaacaggatcatctgtctcagcggtgggcagatgttttcatagacagccagggagtaaacactgttggctctgtgggctgtatggtctctgccataaatagtacacagatgtggctgtgtctagtacaacttttagacacagaaatctgaatgacatatattgttctgtgtcaagaaacttagatttttttttaactattt

SEQ ID NO: 748 - DNA, 503 bp, Homo sapiens
  misc_feature 131, 157, 193, 197, 281, 310, 313, 329, 337, 354, 355, 367,370, 413, 414, 423, 430, 440, 454, 458, 467, 473, 477, 478,484, 487, 489, 500: n = A,T,C or G
ccaggcgctccttgtcggcatcagggagggtggccttgaactgctcatgggctgtggtcagtccctggatctcctcaatggtgtgcacaatgaaggtgtcctgcaggtcctccatggccccctccatccanttgttgaagggtgcagcccgcttggnatactccaagtacagctggtcaatggtctccaacantttntcggtccgctccagaacttcccttcgcttctgagttagggcccccagattgtcccactggtcacagatcttttggcaactggcnttgacactgggtgagtcataataatccanctnattgagctcctgtgcnatggcggnaatctgctccacaccgnnctggtgggtagncangcaactctcgaaagacactccggccgcgaccaccctaagggcnnaatttccancacactngcggccgttnctagtggatccaantcgnaaccaaacnttggcnttannattgtnatnancttgttttctntga

SEQ ID NO: 749 - DNA, 271 bp, Homo sapiens
aaagtgtatggtaggatgtgcacaggttatatgcaaatactacaccattttctataagggacttgaacatcatggactttagtatcctagggggttcttggaacccatcacccataggggcaccataggacaactatagtaccgtgtttatttcctattaattcaggttccgtttagagtctaaaactaaaacctaatcatttagtcacagtgtaaaaacaaatggaaataacagctcaaatcttcaaaatattactatagcattatgttt

SEQ ID NO: 750 - DNA, 252 bp, Homo sapiens
cctgtgtggccggggaggcccagggtccttggactggtccagggtggaagctgatgctgacggagggcaggtgataatagttgtggcggcagctagtgcagggcgaggcttggtgtgagcatcactgggccgctggacaaaagtcagctggcacaagggtcaggggctgtgggcaccactgtcacaggaaagaagttctctcggctgtctttggggtgctttggagtggtgggggtgtcccccgaggacctc

SEQ ID NO: 751 - DNA, 493 bp, Homo sapiens
  misc_feature 128, 175, 199, 255, 326, 401, 419, 432, 435, 444, 453, 455,460, 464, 465, 480, 484, 486: n = A,T,C or G
aaaagactattttactaaatttggagaggtcgttgactgtacaataaaaatggatcccaacactggacggtcaagagggtttgggtttatcctgttcaaagatgcagccagtgtggagaaggtcctanaccagaaggagcacaggctggatggccgtgtcattgaccctaaaaangccatggctatgaagaaggacccngtgaagaaaatcttcgttgggggtctgaatcctgaagccactgaggaaaagatcanggagtactttggccgagtttggggagattgaggcccattgaattgccaatggatccaaagttgaacaaaanacgaggttttgtgtttatcacctttaccttgcccggggcggcccgctcaaaggggcgaatttccagcacacttgncgggcccgtttacttagntgggatcccagcntcngtacccaancctttgccntnaatcntggnncataaccttgtttcnctgntngagccca

SEQ ID NO: 752 - DNA, 263 bp, Homo sapiens
  misc_feature 148: n = A,T,C or G
aaatctccaaacgtggaaactgtatgctttggcaaatcactcagaaccaagtgaaaggctccagcataaacacataaggctgacagagaccagggctcctgtcaacatgaagtggatggtggcaaaatgtgggtctcactagtaaggnccaaagcacattaatgaggctgggctcggtggctcacgcctgcaatccaagcactttgggaggccgaggtgggtggatcacaagatcaggagatggagaccatcctggctaacac

SEQ ID NO: 753 - DNA, 443 bp, Homo sapiens
  misc_feature 158, 193, 298, 301, 309, 344, 357, 363, 364, 372, 393, 403,412, 414, 427, 432, 433: n = A,T,C or G
cctccagggctgggcccaagcgcccgtcgacggcaccctgggcccagaggactcgcgggcctcatctccaatgattcagaactcacgtctgtcgctgctgcaaccccaagatgtcggagacacggtggaaacgcttatgttacatcccggtgatcaangctttcctgtgtggctccatcagtgggacctgctntaccctccttttccaacctctggatctccttaaaacacgcctgcaaaccctccagccctcagatcatgggtctagacgtgttgggatgtttggctgtactctttnaangtggttcncacggagagtcttttggcctttggaaagggatgtncccttccattgcnagatgnntccctggngttggaatctacttttggcantctcatactnttttgaaanantattttttgcgangcctnncccccaaccc

SEQ ID NO: 754 - DNA, 466 bp, Homo sapiens
  misc_feature 324, 344, 347, 356, 360, 374, 380, 386, 389, 404, 405, 422,423, 424, 437, 442, 459: n = A,T,C or G
cctcctgaggatgtcttcagcggcactgagtcaaatccatcaggagtcctcttggaggtaaatgatttgatcttcccaaagagtgacttcttgctggtaaagatgaggtcgtcctctacatcctcgccttccatgatggcgcagctgtcaagcttgctggcagggtcacagtccttgagagtagcattcatcaccagcttggagtacttgtactctagtttttgattctttttccaaaagtagcaggtcaagaccgtgagcagggtggcagtacaggtgcctgcatagatgcccactttcagccagaaatctatggttttgcanaatggagactctctgctcangcnagataaatnccanccaaagcattagcnttgggnttctcnccnccacgtaaagtaacnnctttcttgggaatcccnnnaccccaccaaganttggnttgaacgaaatacctantggtgta

SEQ ID NO: 755 - DNA, 469 bp, Homo sapiens
  misc_feature 9, 351, 367, 386, 411, 443, 446, 453: n = A,T,C or G
acctctttncttgaaatatggcaagacttggaaaaatgtttgcccttagaatctatctcactactttagttagttgtctcctttgggcctgggcacagttctggccctgatctggaacagactcccttttctaaaactgaacttgaccacatcaaaagtttgtaaaacaatctccatggtaattaaacttgcattcaacaccatatggtaacagaagatggcaaaggataagattcagatcttagatctttccaagtagggcatgttagatgatagaaggattagttgcaagctggatctgagctcaggcttgggcatgaaggaaactgtctcccatgtggtttggaaganataggggctccctganctctattgtgaactatacnggtttcatcccaaggaatggatgangtgggcataaaaccttcttcaacactgaaganggnccccttntgtaccagaaacacta

SEQ ID NO: 756 - DNA, 412 bp, Homo sapiens
  misc_feature 144, 158, 196, 204, 280, 287, 290, 301, 302, 308, 323, 331,339, 347, 370, 377, 386, 394, 398, 400, 406: n = A,T,C or G
ccatggagtctatgagctggccgctcaccccgaagtcacacagcttgatctcccctctagagttcacgaggatgttggagggcttcacatctcggtgcatgatctggtgcttctctcggaggtacgccaagccccggagaaccncgatgctgactttncccaggatctcctcgggaatcctcttggcctctttcanacctggtncagggagccgccgtccatgtgttccatgcaaatgctgatctccccgtcactgtagaaggccccgtacaagcccacnatgtacngcngagttgcattnngtgcangacctgcaagatcgnggatgatntggttccngatggccngcttgatctcaaggtgcgataanatttctngaccttggngcgcgacnacgntnaagggngaattt

SEQ ID NO: 757 - DNA, 385 bp, Homo sapiens
  misc_feature 302: n = A,T,C or G
cctcccactcctgcattccatctgactcaacgctgctccccggcctacctaattacccgggcttctggtttcctggaggacaaaaagcaggcggcaagtattctgggtaaaatcctcccaaagtcttcccccaccgtccccccaatgggggactatgggttactgtgatcaagagacacctgaacataaaacacaactacacttctaccaaaatcaaactcaaatccacacaacaaaacagaattgagcaatcttaccagggattgaaaactgagggtgtgagatgctgggctgagggccangaggaggagaaggaggagagggagggaaagcacaaaatgggagggagtgagggctccagggatggctgccagggccttcatgg

SEQ ID NO: 758 - DNA, 290 bp, Homo sapiens
aaaacttacttcaaatttaatttagactcagtaggtaagcaacattcagaatatgaatatgggaatgacttgagtttgagtacagatattcgacaccaaaaaagtcatactacaatgaattcttatgaatgttatcaatgtgggaaagccttctgcccgaagttcatcccttattcgacatcagatcattcacacaggagagaaaccctataaatgcagtgaatgtgggagattcttcaaccgacgtacaaaccttactaagcatcaaaaacttcatgctgaagcaaagg

SEQ ID NO: 759 - DNA, 288 bp, Homo sapiens
aaaaaaaatttacttaaaagaaaaatggaaaaataaaactttcaacactagactgccgccctgttaagaatgtctaatatgcaaagtattggaaagcaggcatttttaccaaagagcaatgtcactataacttatgaacagaaagttgtgaaatataagggtactcatggaaaccagtgaagagaggaaacaccggcaattgttcaacacggaacagtgagcaggtactttgggagtaaggctctgagagatggaagacgctggtctcagaactgaggtgatgtctgg

SEQ ID NO: 760 - DNA, 432 bp, Homo sapiens
cctagagagtcacatgtctcagttcagaaatctatcgaagtggcagagctggaattcaaacacaagcagccgttctctgctattccaccctggtgtccaagcaacatggtagggcagaaggaagaggatcttacaaagagtaagggaaagggagaggggcagaggctgcttctcagagccaccaaaggacaaaataagacaggtgtgagcccagtggaggaggcacggggcagagaccagccactgttgctggcacgctggtgcacgtagcactgtggcagatggacctggagaggaagcaggagggacagcacaatggagccaagaaaggacttagcatggccgggcgcggtggttcatgcctgtaatcccagcattttgggaggccaaggtgggcagatcacctgaggtcaggagtttgagaccacctgg

SEQ ID NO: 761 - DNA, 246 bp, Homo sapiens
cctgggcacagaaagcctggggagcgtcaaggagtcccctgtgtcctaggaaggcactgaaatagggaacagatcctgggagccagagtctcccccaagtaccccaaaggggacaggaatcggaatggtgaagcgggaagggtcttacatgctggttgtctggggcaaggagactggggaagcacagattctgcttctcaccccaaacggtggggttgggggtgggctgagatgcagaccctctgg

SEQ ID NO: 762 - DNA, 411 bp, Homo sapiens
  misc_feature 321, 365, 377, 386, 402, 408: n = A,T,C or G
aaaaacgtgaaacctattcttagctcacaggccatggagaagctggtggggaccagacccagctccttagctggctgggctggggagggggtagtgacagtggcagctgctactcactgctcagtgtggaaaacacaggacttggcaatcacagcccgcagaaccatcatgtgtggcagaagcctgagggatgcggtttcttgcccacgtgctctgttcattttctgttgtttttctgcacttaaagaattcacatggaagcatgttttataaaatgaattaccagagaaacagagatgggccgagattttcagaaatggncccatgtgaccaagttctgctgtttgggtgacagtgctttgaanatctcctttgangatgtgcantctttttttttttttnaaaaanaaa

SEQ ID NO: 763 - DNA, 581 bp, Homo sapiens
  misc_feature 430, 475, 517, 550, 556, 557, 575, 576, 578, 580: n = A,T,C or G
aaacttccctctgtggaagatattcaaaagccacaagtggtgcaaatgtttatggtttttatttttcaatttttattttggttttcttacaaaggttgacattttccataacaggtgtaagagtgttgaaaaaaaaattcaaatttttgggggagcgagggaaggagttaatgaaactgtattgcacaatgctctgatcaatccttctttttctcttttgcccacaatttaagcaagtagatgtgcagaagaaatggaaggattcagctttcagttaaaaaagaagaagaagaaatggcaaagagaaagttttttcaaatttctttcttttttaatttagattgagttcatttatttgaaacagactgggccaatgtccacaaagaattcctggtcagcaccacccgatgtccaaaggtgcaatatcaangaaagggcaggcgtgatggcttatttgttttgtattcaatgatgnctttccccattcatttgtctttttagagcagccatctacaanaacagtgtaaagtgaacctgctgttgccctcancacaanntcacatctttagaccctnnanang

SEQ ID NO: 764 - DNA, 253 bp, Homo sapiens
cctccctacaaggctcccccctcccccgaccctttacctagggcctgccagaaaacacttctcattgtgaaggggacagaactaatgggggacagtggaggacatggatctacccccattcctgagtcacacgactcacccagagtcacgggcccagactgggcctggggtcatggcgccaggttgcccctctggcctgtccacagctctcggagctcgacatgacaacccaggtcccgcagggcggccttgg

SEQ ID NO: 765 - DNA, 270 bp, Homo sapiens
  misc_feature 11, 13, 17, 23: n = A,T,C or G
ccttaaggctngngctnttggtnttcccctacacacaccagaactgggaagtgcagtacagtcgtgatgctcctctgcccccccggcaagacctcaacgcccctgacctctatatccccacgatggccttcattacttacgtgctcctggctgggatggcactgggcattcagaaaaggttctccccggaggtgctgggcctgtgtgcaagcacagcgctggtgtgggtggtgatggaggtgctggccctgctcctgggcctctacctgg

SEQ ID NO: 766 - DNA, 449 bp, Homo sapiens
  misc_feature 317, 343, 381, 391, 400, 401, 413, 447: n = A,T,C or G
ccagtgtaattgttccaacaaagggaacctactttggtgcccgaggaaatggctgtttgtgatgctggggaaaagtcaagatgctgacgcctaatggctgttctagcctttccaggtttgtaacatgaagatggggaaggaaatggcaccactgctgtttgtaatctgaggaactcttggcagcattcactctccaaagcagtacaaaacttacaaagaagtcaaaagtcttaacactcccattctccaggaactcttgtctgtgtcatctggtaggagggaggaatcctggttccttcaggtccttgtcatgttanctttttgatagctttcaatccactcngctcgctcaaccttgcttgctggcctgaatgtaataantggtgtgtcnatccttaannaatcacttttgnaaaaggtttccctggacattcccttttaaccccngt

SEQ ID NO: 767 - DNA, 466 bp, Homo sapiens
  misc_feature 308, 315, 332, 340, 364, 381, 386, 419, 420, 422, 432, 441,442, 464: n = A,T,C or G
ccagtgagaggcactccctgcagggatttcacagcccaaatggcgggaccgtccaggggctccaagaccaacaggagcatgtggtagccacgtcacaacccaagaccatggggcatcaggacaagaaagatctatgtgggcagtgttccccgttaggctgcctcatccggatattgattgacgggatctctctcgggctcaccctgcgcctgtgggacgtgtatctggtagaaggcgaacaggcgttgatgccgataacaagaatcgcctttaaggttcaagcagaagcgcctcacgaagacgtccangtgtggnccgtgggcacgtttttncaaccggntcgttgatacctgggccatggatnacgacactgtgctcaancaatnttagggcctctatgaataaacttgacaataaannanggggacctgntacccccanncaaaccccgagcaatgggcttngg

SEQ ID NO: 768 - DNA, 459 bp, Homo sapiens
  misc_feature 350, 443: n = A,T,C or G
cctgacttctgctggcatcaagaggtgggagggccctccgaccacttccaggggaacctgccatgccaggaacctgtcctaaggaaccttccttcctgcttgagttcccagatggctggaaggggtccagcctcgttggaagaggaacagcactggggagtctttgtggattctgaggccctgcccaatgagactctagggtccagtggatgccacagcccagcttggccctttccttccagatcctgggtactgaaagccttagggaagctggcctgagaggggaagcggccctaagggagtgtctaagaacaaaagcgacccattcagagactgtccctgaaacctantactgccccccatgaggaaggaacagcaatggtgtcagtatccaggctttgtacagagtgcttttctgtttagtttttactttttttgtttgnttttttacctcggccg

SEQ ID NO: 769 - DNA, 409 bp, Homo sapiens
  misc_feature 178, 183, 200, 218, 223, 229, 236, 242, 254, 268, 278, 289,332, 346, 348, 359, 369, 380, 393: n = A,T,C or G
aaagaaaattcacacatcacatattctattggtccccaaattctctaaggacttgggttacccctctgaccatctgaggagtgcacgggagcacatggtggggtagaaggagaagtatggagtgggagaatattgtaggggataaagtccttgagaacaaacatcagactgaaggcantcttncttggatcttgaagacncaccttctcacctctaantgttnctgttnatccatnacttangggccttttttnaagagatgtcctcntcccttagtnttatcctaacnaggatctatataaaagcgcctaaccagtgcctggcacattgangtgtattcttttcntnctaaagggggncaaagatgtntgtcaggaaangaaaattaacctngaatgtttatagggca

SEQ ID NO: 770 - DNA, 427 bp, Homo sapiens
  misc_feature 183, 256, 334, 376, 379, 380, 390, 401, 405, 417, 425: n = A,T,C or G
cctagtatgaggagcgttatggagtggaagtgaaatcacatggctaggccggaggtcattaggagggctgagagggcccctgttaggggtcatgggctgggttttactatatgataggcatgtgattggtgggtcattatgtgttgtcgtgcaggtagaaggcttactagaagtgtgaaaacntaggcttggattaaggcgacaccgatttctaggatagtcagtagaattagaattgtgaagatgataagtgtanagggaaggttaatggttgatattgctagggtggcgcttccaattaggtgcatgagtaggtggcctgcagtaatgttanccggttaggcgtacggcccagggctattggttgaatgagtangcnnatgggttccnataataactantatnggggataagggngtgtaggngg

SEQ ID NO: 771 - DNA, 524 bp, Homo sapiens
  misc_feature 36, 208, 242, 349, 370, 402, 428, 434, 456, 461, 462, 469,471, 478, 481, 485, 497, 501, 508, 522: n = A,T,C or G
gccgaggatggccgtcatggcgccccgaaccctcgncctgctactctcgggggctctggccctgacccagacctgggcgggctctcactccatgaggtatttcttcacatccgtgtcccggcccggccgcggggagccccgcttcatcgcagtgggctacgtggacgacacgcagttcgtgcggttcgacagcgacgccgcgagccanaggatggagcccgcgggcgccgtggatagagcangagggtccggagtattgggacggggagacacggaaagtgaaggcccactcacagactcaccgagtggacctggggaccctgcgcggctactacaaccagagcgaggncggttctcacaccgtccaaangatgtatggctgcacgtggggtcggactggcncttcctccccgggtaccaccagtacncctccnacggcaaggattacatcccctnaaaanngaacctncnctcttgnacncggnggacatggcaanttanaccccancacaaatgggaagngg

SEQ ID NO: 772 - DNA, 277 bp, Homo sapiens
  misc_feature 152: n = A,T,C or G
cctcaatcttccggatgagctcataggacttggagcggtcaagcagggttctgatggcagggagcgggtccaggacgatggtctcagggtgggcatcgatgtactcctggaacctgtgcaccagctccagggactggctatcattctggtcnggcttcaaggatgacgtcagtcagcttgtggatgatgacgtccagggggccctgctcctcgatcggccggctaaggttcagctgcacaacctccatccctcgcttcctgcacagctcggcgaagg

SEQ ID NO: 773 - DNA, 294 bp, Homo sapiens
aaagccatgggaacccagatcaccagatccggagcctgactctagcccctgagccacctgttgccctaacaccctgtctgactctctcccgctgcagcagccagtccctcctgcactccagcaactccagccatcagtcatcttccagatccttggaaagtccagccaactcttcctccagcctccacagccttggctcagtgtccctgtgtacaagacccagtgacttccaggctcccagaaaccccaccctaaccatgggccaacccagaacaccccactctccaccactgg

SEQ ID NO: 774 - DNA, 559 bp, Homo sapiens
  misc_feature 92, 108, 158, 248, 265, 301, 309, 334, 365, 374, 393, 413,414, 427, 430, 434, 438, 446, 455, 463, 464, 488, 492, 524,527, 539, 551, 553: n = A,T,C or G
atgatgtcaggctcggcaacaggctccttgttgacactcaccacattgtttttcaagctgacttccagcttgtcaccttggagagactttanccgcaccagggccccnatgcctccgctaaccaggatttcatcaccaatgtggtatttcaaggatgntgggcaagttccttggcatctcccaagagtctggctccgttctcttggtggcagggctcggaaggcttcatttgtgggagcaaagactgngtagactccttcccggntgagggtctccgtcagtcctgcagactggatggcanctaccagnatgctaaagcattgtctcccttcangacatccatgacagtccccattgggggggtnagcaccccngtccatcgggaacaggggncccgtacctcccctctttgnncacgggccgccantcnagcntgtncctcaatngcaaaaggntattaccnntaaacaaaacccctcagctgttcngccnccaaacttccccggcgaccccccttggggcanaanctcaacacgccngcggcccttaantntggggg

SEQ ID NO: 775 - DNA, 573 bp, Homo sapiens
  misc_feature 459, 505, 508, 517, 519, 526, 539, 540, 548, 557, 559, 560,569, 572: n = A,T,C or G
aaatgtacttgctcagctcaactgcatttcagttgtattatagtccagttcttatcaacattaaaacctatagcaatcatttcaaatctattctgcaaattgtataagaataaagttagaattaacaattttattttgtacaacagtggaattttctgtcatggataatgtgcttgagtccctataatctatagacatgtgatagcaaaagaaacaaacaaaagccaggaaaacactcattttcgccttgaatatgtaaatgggattaattttgtcctgtgccttatgtggaaaggaacttctttggttttccttttttgttctggtggaagcatgtgcaggagacatatcatccaaacataaaccattaaaatgtttgtggtttgcttggctgtaattttcaaagtagttaattgaggacaaagggtaatgcagaagtgatagctttggtttgcttgntcttgttttaagtggccttgattttacctcgggcgcgacaccctanggngaaattccncncactggncggccggtactannggatccanctcggaccnannttggcgganaang

SEQ ID NO: 776 - DNA, 592 bp, Homo sapiens
  misc_feature 416, 507, 535, 541, 543, 549, 552, 556, 566, 578, 584: n = A,T,C or G
ccagcaccaaggcttataccagtcagttcatctctctggtgatgtttggtttgatgatgtctgaagaccgaatttcactacaaaacaggaggcaagagatcatccgtggcttgagatctttacctgagctgatcaaggaagtgctgtctctggaggagaagatccacgacttggccctggagctctacacgcagagatcgctgctggtgatggggcggggctacaactatgccacctgcctggaaggagccctgaaaattaaagagataacctacatgcactcagaaggcatcctggctggggagctgaagcacgggcccctggcactgattgacaagcagatgcccgtcatcatggtcattatgaaggatccttgcttcgccaaatgccagaacgccctgcaagcaagtcacggnccgccaggggtcgccccattatactgtgctccaagggacgatactgaaagttccaagtttgcgtataagacaattgacttgcccacactgngggacttgccttccagggcatcctgaancgtgantncccttnaanttgntgtcctttcnccttggttgttntcccanggatatgg

SEQ ID NO: 777 - DNA, 372 bp, Homo sapiens
ccttagggcgggaacacttttcaacccaagccaggcttcaggggcaagcccaccaacagaccccaatttccacaggggaggcagatcttctatacctacagtgacagaaaatacactaaagtgcagtataaaatataaaaaggtttgattctgaatagaccaactgctaattttccttaaaaaaatttttaatttggttgagtaaaaaccaaattagttcactgaatctcattttgtaggtaagagtcttatttgcaatacgaaaactggagcttatgactgctttgattttctctgtagcacaggataaccagtattagtggagaacactacaaaaggtggcttgtggtgagttctttgcatagtggtttt

SEQ ID NO: 778 - DNA, 381 bp, Homo sapiens
ccaatatcttagaggtgtgtcgcagcaaacatatgcccaagtcaacgattgagacagcactgaaaatggagaaatccaaggacacttatttgctgtatgagggtcgaggccctggtggctcttctctgctcatcgaggcattatctaacagtagccacaagtgccaagcagacattagacatatcctgaataagaatggaggagtgatggctgtaggagctcgtcactcttttgacaaaaagggggtgattgtggttgaagtggaggacagagagaagaaggctgtgaacctagagccgtgccctggagatggcaatcgaagcaggagctgaggatgtcaaggaaactgaagatgaagaagaaaggaacgtttttacctgc

SEQ ID NO: 779 - DNA, 530 bp, Homo sapiens
  misc_feature 146, 327, 379, 395, 409, 422, 448, 455, 465, 467, 472, 489,497, 499, 511, 521, 523: n = A,T,C or G
aaaagtaattataatggcttgaattcaaagtcattcaaatgaacactgtcaagtaatttcacttgatgtgtatatatttcatcaccactgtttacattacccttctttaagtataaccatcaattcttcaatttctttttatcaanttccctccccaagtccccaaattaagaatgccaaatagtcttgaaaacccagagctccatattttaatgttttcttaagaacacatttgtgaactcacaaaagtgttcctctttcaactttgacaatgcaagttcttactttaagtaaacaaacctgtcctaaaatcccaacaagtaattnttgagaacttaaacaccttgacagtgtccttaaaaatgctatgacagtaaantgccaataggcattgncaatgacctcttanatgggatcatttnaactcctccgaactgaaaaatgcccncacccangattacactnanattcnattttacttgaaggctncctttagntnacccattttccncacccattantnttcatta

SEQ ID NO: 780 - DNA, 465 bp, Homo sapiens
  misc_feature 280, 381, 389, 422: n = A,T,C or G
ccttaacccttgccctgggagcccccaaggataataacatccctttctggggcaacaaaactgggaccgagtgggtaactgatatttgacaggggaacctaaacagtctacggaagtgtcctgagatgggcgtaaagtcaaacagacccaagcacacaggttaacacttgaaataggaaagagtaagagcttctgttcaggctggaggtgctcgtatggtgggacaggaaaggggaaaagagaaaggggcaacatggcagacataccacggttcctacanagattaggggcagccctggcccgggaagtacacagggcagaaagctgactctcaggccaggaaggagtttagctctgacccatcctcagggaccacgggtntcccccancctcagctgacacacacacaaaggagcgtttangacacaggaagataaaggggttacccctaccaggaaacaagaa

SEQ ID NO: 781 - DNA, 378 bp, Homo sapiens
  misc_feature 152, 252, 276, 286, 289, 326, 339, 367, 371, 372: n = A,T,C or G
ctcttgatgttgactgtaaacgcctaagccccgatcggtgcaagtgtaaaaaggtgaagccaactttggcaacgtatctcagcaaaaactacagctatgttattcatgccaaaataaaagctgtgcagaggagtggctgcaatgaggtcacnccggtggtggatgtaaaagagatcttcaagtcctcatcacccatccctcgaactcaagttccgctcattacaaattcttcttgccaggtgtccacacatnctggcccatcaagatgttctcatnatgtgttacnagnggccgttcaaggatgatgcttcttgaaaattgcttantttgaaaaatggngagatcaagcttagtaaaagattcatcnctgnnaacaaa

SEQ ID NO: 782 - DNA, 430 bp, Homo sapiens
  misc_feature 113, 152, 158, 166, 225, 228, 240, 264, 275, 300, 314, 324,337, 339, 347, 366, 390, 418, 420: n = A,T,C or G
ccaatcagtgggatccgaggtggctcggcccatcatgcccaggatctgagcccacatctggcaccagctctaccaagggcctgttgggcccacacaagcttgcctgtacctantcaggctggtaccggcacctcctgaaatgggtcaccctncggttnctgctcancagctctgagcccttttccagcctcttggagggaagtaacaacaacagcatctgccgangancacacggttcangctccatcaatgacggtgatgtcnaggggccccanggctaccctccaccttgagttaccnttgatcacaactanggcatctttntggctgagttaangngagaacantccccttaagcctcccccnaataaatgaaaaatgctctactgnggggggctggaaacaaaaaaaccaaaancngcctttttac

SEQ ID NO: 783 - DNA, 364 bp, Homo sapiens
  misc_feature 143, 174, 179, 195, 201, 212, 214, 243, 262, 268, 272, 286,292, 296, 303, 315, 323, 338, 348, 352, 354: n = A,T,C or G
gcctaaaggaggaagaaagggaggccacaaaggccgggcgaggcagtatacaagccctgaggagatcgacgcgcagctgcaggctgagaagcagaaggccagggaagaagaggagcaaaaagaaggtggagatggggctgcangtgaccccccaaaaggagaagaaatctcttnactcngatgagagtgaggatnaagaanatgacttcccncnaaagcgccaaggcgttgaagggctcattnacatctagaaccccaaccnggtggnacanacaaccaaaaaggncacacnactngatcttngaccggcccaangagctttntaggagagaacccanaagagatttntaancncaaagccaaa

SEQ ID NO: 784 - DNA, 442 bp, Homo sapiens
  misc_feature 166, 212, 228, 248, 272, 283, 293, 317, 320, 332, 333, 341,347, 366, 383, 406, 413, 417, 425, 427, 433: n = A,T,C or G
ccttcgagagtgacctggctgcccaccaggaccgtgtggagcagattgccgccatcgcacaggagctcaatgagctggactattatgactcacccagtgtcaacgcccgttgccaaaagatctgtgaccagtgggacaatctgggggccctaactcagaagcgaanggaagctctggagcggaccgagaaactgctggagaccattgaccanctgtacttggagtatnccaagcgggctgcacccttnaacaactggatggagggggccatngaggacctgcnggacaccttnattgtgcacaccattgaggagatncanggactgaccacnncccatgancagttnaagggcaccctcccttatncccacaaagaacgcctngactgccccggcgggcgcttaanggcgaanttcnacacactngngggcgntctaatgga

SEQ ID NO: 785 - DNA, 359 bp, Homo sapiens
  misc_feature 293, 315, 344: n = A,T,C or G
cctctgcctgctggggattactcgatcaaaaccttccttccctggctacttcccttcctcccggggccttccttttgaggagctggaggggtggggagctagaggccacctatgccagtgctcaaggttactgggagtgtgggctgcccttgttgcctgcacccttccctcttccctctccctctctctgggaccactgggtacaagagatgggatgctccgacagcgtctccaattatgaaactaatcttaaccctgtgctgtcagataccctgtttctggagtcacatcantgaggagggatgtgggtaagangagcaaagggcaggggtgctgtggacatntgggtggaaaaagga

SEQ ID NO: 786 - DNA, 367 bp, Homo sapiens
  misc_feature 52, 75, 97, 118, 167, 173, 178, 182, 228, 237, 251, 299,305, 314, 318, 320, 331, 340, 347, 348, 353: n = A,T,C or G
cctgagcggctagtctttaagatgcgcttctatcgtttgctgcaaatccgancagaggccctcctggcggcaggnagccatgtgatcattctggggngacctgaatacagcccacccnccccattgaccactgggatccagtcaacctggaattgcttttgaaaagnacccangggcncaantggatggacagcttgctcagtaacttggggtgccagtctgcctctnatgtagggnccttcatcgatagntaccgctgcttccaaccaaaccaggaggggggccttcaccttcttggncagcantcactgggncccncnatctcaactantttttcccngcttttnntatgngcttgggggacagg

SEQ ID NO: 787 - DNA, 476 bp, Homo sapiens
  misc_feature 142, 363, 386, 393, 441, 445, 473: n = A,T,C or G
ccttcgggaacgccaagaccgtgaagaatgacaactcctcccgcttcggcaaattcattcgcatcaactttgatgtcaatggctacattgttggagccaacattgagacttatcttttggagaaatctcgtgctatccggcnagccaaggaagaacggaccttccacatcttctattatctcctgtctggggctggagagcacctgaagaccgatctcctgttggagccgtacaacaaataccgcttcctgtccaatggacacgtcaccatccccgggcagcaggacaaggacatgttccacgagaccatggaggccatgaggattatgggcatcccagaagaggagcaaatgggcctgctgngggtcatctcaggggttcttcanctcggcnacatcgtcttcaaaaaggacggaaccctgaccaggcgtccttgcccgncacncagttgcccaaaaggggcccatctcttnggt

SEQ ID NO: 788 - DNA, 538 bp, Homo sapiens
  misc_feature 99, 128, 261, 372, 437, 447, 463, 473, 476, 480, 489, 497,514, 525, 529: n = A,T,C or G
aaattttatttcaaaagcttggatagcttcaatatccaggttgtggcaaaatcaggacacgtgtaaaataccttacaatacattagattcccaaaaggnaccaaaaagtacagtaaaattaacacttncgttacaggaaatgtatgacgcaaataatataaaattaaaaggtgaaaaaaaggtgacactggtttcctaagatacaatttactctttacaaccagggtccacaggtccaggctgcagagcggcagcaggaancagagcctcccacctgcttctgggggacctggtaataaaaatcagcccatgatggcgctatggcctctcagacaccacacgctgcctaaacacctagagctctggaaatantcaaacaggagaagtgatttccatgggggaaaattttacctgccccgggccgggcgctcgaaaanggccgaattncagcccacttggcggnccgttacttnttngatnccaggctcngtaccaancttggcgtgattaatgntcattacttgnattnttctgtgtg

SEQ ID NO: 789 - DNA, 611 bp, Homo sapiens
  misc_feature 203, 276, 332, 338, 396, 407, 415, 446, 452, 476, 481, 503,515, 516, 523, 525, 530, 533, 543, 555, 557, 566, 570, 602,605, 608: n = A,T,C or G
gtgaaatggagaagtatctgacacctcagcttcctccagttcctataattccagagcataaaaagtatagacgagacagtgcctcagtcgtagaccagttcttcactgacactgaagggttaccttacagtatcaacatgaacgtcttcctcccttgacatcactcacctgagaactgggcctctacaaatcccagagaccgngcgtaacacacatcaagacagaacctgttgccattttcagccaccagagtgaaacgactgcccctcctccggncccgacccaggccctccctgagttcaccagtatattcagctcacaccagaccgcanctccanaggtggaacaatattttcatcaaacaagaacttctacaccagatcttcatctttcttntccctacccancaaggggncaccttgtaccagctacttgaatacaccggntcttanatatgcccaagttttacaaatcanacaancaccaatgggacactttttaantgttttcttatnntcaagcntngcctnggnaaggaacttnccccgggggggncngtttccaangggnggaaattccaacacacttggggggcggttctnatnggnatc

SEQ ID NO: 790 - DNA, 498 bp, Homo sapiens
  misc_feature 358, 384, 418, 439, 448, 458, 464, 468, 472: n = A,T,C or G
aaactgtaaacagcttgtttaactgttaagagaacattgcagtaatgtacctctgttagtgagcaccttctcttctgtgcttatctcttcaagataaatacatggaaggatgcgaaaatcggaacaccaactattgtgtctcacttgcatctaagtgaagcagccacagctgtgagagttttcaaagcagaaagatgctgatgtgacctctggaattcagacatactgagctatgggtcagaagtgttttacttaaaaagcaaacaatccccaggaaatactgaataggaaccagcaacacaaggccagcttgtgttgtatgtttattaatacagtctaaaaaaaaaaagcaaaaccncaacacacatccccaaacaataactntcaatcacataggctaattggttcattattttgnaaaaactgacatcctaacccntggccctanaaactttccnttttgngttnaacntacccccttggctttaataccggccc

SEQ ID NO: 791 - DNA, 333 bp, Homo sapiens
  misc_feature 155, 231, 243, 261, 291, 301, 314, 321: n = A,T,C or G
cctgtctgaggataccactgaagagacattaaaggagtcatttgacggctccgttcgggcaaggatagttactgaccgggaaactgggtcctccaaagggtttggttttgtagacttcaacactgaggaggatgccaaagcttccaaggaggccntggaagacgggaaattatggaaataaagtaccttggactgggccaaacctaagggtgaaggtggcttcgggggtcntggtggaggcanaggcggctttggaggacnaggtggtggtagaggaggccgaggaggatntggttggcanaggcccggggagnctttggnagggcgaaggag

SEQ ID NO: 792 - DNA, 172 bp, Homo sapiens
ccaaaacaggagtcctgggtgatatcatcatgagacccagctgtgctcctggatggttttaccacaagtccaattgctatggttacttcaggaagctgaggaactggtctgatgccgagctcgagtgtcagtcttacggaaacggagcccacctggcatctatcctgagttt

SEQ ID NO: 793 - DNA, 256 bp, Homo sapiens
ccatgacagtgaaggggctgttaggaatatcaacaccaccgaagcgcacatagatcacatatgtgcccggcttggcagctgtgtagaagatgtcataggttccatcttcattctcaatgacatcggcctcggcctcagtgccatctggggctcagaaccgtgcaggtcactttacccttcccggcagtcttggcatcaaccacaaagcctacttcttcgccagttttcacagtggaggcgattccaggacccgtgg

SEQ ID NO: 794 - DNA, 310 bp, Homo sapiens
  misc_feature 207: n = A,T,C or G
ccaggcgtctgcgaaatcatatggctgtagcattcgtgctatccctgggggttgcagctttgtataagtttcgtgtggctgatcaaagaaagaaggcatacgcagattcctacagaaactacgatgtcatgaaagattttgaggagatgaggaagctggtatctttcagagtgtaaagtaatcttggaatataaagaatttcttcangttgaattacctagaagtttgtcactgacttgtgttcctgaactatgacacatgaatatgtgggctaagaaatagttcctcttgataaataaacaattaacaa

SEQ ID NO: 795 - DNA, 149 bp, Homo sapiens
aaaccctcttcagagcaagcgtggaggatgatggagaatcgtgtgatcagtgtgctaaatctctctgcctgtttggactttgtaattatttttttagcagtaattaaagaaaaaagtcctctgtgaggaatattctctattttacctgc

SEQ ID NO: 796 - DNA, 579 bp, Homo sapiens
  misc_feature 140, 372, 416, 428, 445, 453, 468, 498, 505, 507, 537, 540,546, 547, 555, 556, 564, 567, 571: n = A,T,C or G
ccaccatccaaaaaagcagtcagatggaatggaagaatacaaaacctttggtctaggacttactaatgttaaaaaaaataggtgacagggaacaggttaagaaaactatgtagatgtaggaaagatgggaggaaataaancctgttctggatcccccatcccctccagaataagagcatgttctgcatgtattaatcttttatgctgtttatgaaacaggcaagataagtctgtttttccttctggaaccataagggtaaccagattttcatctacagacaagtggtaagtcatttgtgtttatcatgcaacttacttacaaacaccaagatattaattgctgcaacttgatgtcaaatccattactgggtnatttttaagactatgtacccacaccatacatacctacatatatntttacacatgcntacaaacctgtgtgccnagtgacanctatttttttttatncttgggtaagtcattaaaaatctgcctttngtcatcntnttagaatattccaaatatttggggtatatnatnaacttnntcccctcnncccccttngtnattnttccctcc

SEQ ID NO: 797 - DNA, 338 bp, Homo sapiens
  misc_feature 12, 62, 83, 93, 101, 113, 122, 133, 140, 167, 181, 189, 194,216, 227, 238, 244, 246, 252, 256, 263, 272, 289, 292, 295,313, 315, 323, 334: n = A,T,C or G
ccacacagccanaccccacagcctacaaacaccacaccatactgcaatgctggggaccaaanccaggctctgtgggcccacgncagccagcanctccctcnggaaccccaagnacaccgagnttgcttccctnttgaggnttgaaaccacaaccaaaggctactctnttttttcttgggcnttttggtnttttngggttgttatttttgtgggttntttgtttttgntttaacctttncaaacncnattggngatnaggaatncctttccanggtctcccaaacacatntgnggntctggggctctgaatgtntnaacacccnctggggatatnacta

SEQ ID NO: 798 - DNA, 140 bp, Homo sapiens
  misc_feature 21, 22, 41, 42, 53, 58, 88, 97, 105, 108, 124: n = A,T,C or G
ccaaagtgtaattggtctgcnnatgggaaccaacaaatgtnncagccaggcangtatnacagcttacgggactaggaggcatctttangatcccaanatgcaaantgncaaacctatttgaccngacccgcaattatgtt

SEQ ID NO: 799 - DNA, 502 bp, Homo sapiens
  misc_feature 148, 381, 388, 403, 411, 419, 425, 429, 434, 437, 448, 453,456, 463, 477, 490, 492, 493: n = A,T,C or G
ccagtcctacaaccagtattctcagagataccatcagagaacaaacactaatgttaattgcccaattgagtgcttcatgcctttagatgtacaggctgacagagaagattcccgagagtaaatcatctttccaatccagaggaacaangcattgtctctctgccaagatccatctaaactggagtgatgttagcagacccagcttagagttcttctttctttcttaagccctttgctctggaggaagttctccagcttcagctcaactcacagcttctccaagcatcaccctgggagtttcctgagggttttctcataaatgagggctgcacattgcctgttctgcttcgaagtattcaataccgctcagtattttacctnggccgcnaccacgctaagggcnaattccanccacactnggcggntcgnttacntantggatcccagntcggnccnaaggttngccgtaatcatggncaataggctggtntnncgtggatcc

SEQ ID NO: 800 - DNA, 276 bp, Homo sapiens
ccacccaggaaccctggatccagtttgccaccatccgagacaacatcctctttgggaagacatttgatgcacagctgtacaaggaggtgctagaagcctgcgccctcaatgatgacctcagtatcctgcctgctggagaccaaacagaggtgggggagaagggtgtcacccttagcggaggacagcgtgcccggattgcccttgctcgtgctgtctaccaggaaaaggagctctatctcctcgatgaccctctggccgctgtggatgcagatgtgg

SEQ ID NO: 801 - DNA, 387 bp, Homo sapiens
  misc_feature 20, 115, 129, 148, 172, 180, 223, 236, 296, 303, 310, 316,320, 321, 326, 334, 340, 346, 347, 355, 357: n = A,T,C or G
caagtcgcactccacattanagtttgcctatcaggtcttatttgatccacaatcttccttatttggggttcaaagcccatatcaagcattctatctgcttcatcaaggacaaggnaggttgttcttctnagattggttttttccaccnctctaaaaaagtcaatcagtcttncagggggntgcaatacagatttccacacctctctccaaatcacgtatttgnggtcccttaggancaccaccgtagatacaagtacacttcaagcgacatgctctacaatattcaagcagctacnttgctgnaccatgntgggcncagnntcccnagttgggnggccancacccnnacaaatangnccatcccctctctctaaggaatggcttgat

SEQ ID NO: 802 - DNA, 542 bp, Homo sapiens
  misc_feature 143, 406, 430, 434, 443, 445, 453, 458, 469, 479, 507, 517,525, 529, 533: n = A,T,C or G
cctcttcccctcctcttcacccatgccacagcattaaataaacaaaaagcaactctttacagcacaaactacacagggaagtccttcctcccagccctgggcgcacagcatggaagaggagctcgggaggacagggttggggnctccagggtctgacaccaccccactcctcttcctagcaccatggggtagggacaggcagctttgaacagaggaaacaaaactccaacttcctccaaactcctatgcaggcaggtccatctagtctggtacttctggcccaagggttttctgctccttccaaacctttgagctttctcaggacgtgagcttagctgagacttctccaagaggggctggagccctggtctctgaggcacagtggggcctgggaaacaggcaagantctggttccaaagtttttcccagnccangacctcggncngcgaccanctaanggcgaatttcngcacactggngggccggttacttagtggatccagcttnggaaccaaancttgggcntaantcangggtcatta

SEQ ID NO: 803 - DNA, 542 bp, Homo sapiens
  misc_feature 328, 336, 341, 361, 368, 392, 401, 421, 424, 438, 445, 456,461, 493, 496, 503, 504, 511, 525: n = A,T,C or G
ccagctatcagctgatcgtcttctgtctggacgctcgtcctgcttctgacatcaaaatcttctgtctcaaagtcagagtcatccaactcctcaggggtccttatcatcagcactgctttcctgatgtcccggatgccatcatataccaggcgggaagcatcgataaactcattctcatccatgggctgggcagggtccgagctgagggcttccacggctgcttctacttgctcagtaaaacgtggcatgactgtgttggagagcagcttagtggcttccagaaccttctctgtgtagactcctggctcatagttgtccatctttaagngactacgngaatnaacccgggctgcccggctcnaattcancaacttgtgcggcccaggccatcncatcccttnttttgaaaagcaatgaaacnttngttcacatttttcnaaatggnaattttctganaacanccaagaaagtcatcaatggaaattaatgtcantcnacaagcnnctgtganaacaccggacttgntttttcccattgttttt

SEQ ID NO: 804 - DNA, 452 bp, Homo sapiens
  misc_feature 205, 228, 309, 340, 374, 384, 388, 399, 406, 419, 422, 425,433, 436, 441, 447: n = A,T,C or G
aaagtaatcaacctctctgtccttccattagtctggatcgtctaaagattgttttatttttagaggctcatccggtcagatgttagtgatgtgaaatttcaggccaggcgtgacgtcagcgtggcatttgaaacagctccatgtttgcccttaagtgctgtctgaccgaagcctgtctgtcctcagatataaagatgaagcgcanctgtataaagaagagcacctgangaatcggcagcaccctcactgctacgttcagtacatgatcgccatcatcaacaactgccagaccttcaaggaatccatagncagtttaccttgccccggcgggccctcaaanggcgaattccaacacactggggggccggtctagngggatcccanctcngtacccaagcntggcggnaacattgggcatngcntgngtcctggnggntcctnctctgntgttg

SEQ ID NO: 805 - DNA, 141 bp, Homo sapiens
aaaggagttggaggagagggagggggaggacatggcaccattccagaaaccagcattgttacaacaccatagccagtatatttagtttggcttttcctaacatagaaatcttcaaagctggggaagtggaaataaagtttt

SEQ ID NO: 806 - DNA, 246 bp, Homo sapiens
aaaggcagacactgagtcagtattaatagattaactaaactgcactgtaatttagataaaattactgtgtctcactgtgtattacatgcaaaatccacataaattgtcatttaaccaacagtactgcacgagcgaacatctcgatatatgaaaactgcatcatcaattcaacgttttggtacttgaaactgcatcataaatgcaacattgtcatatgtgaaaacgacaccctaagtccttcttttt

SEQ ID NO: 807 - DNA, 369 bp, Homo sapiens
  misc_feature 74, 116, 240, 251, 302, 355: n = A,T,C or G
ccaggtgctgctatacccccaccatctctcgcacagcagtatatggccgtgtcgtcagacctcaggttgctcangtccatgtaggctgtggtgatggacgtgtccctggtcatggngacccggccctgaaacttctgtcaaaagttttgtgccaccattcttagggttgatccgtcccaagaattcaagaccttgtccaggggcctgtcggacccagctgaaagccttgtcgatgaaggngcttcctgaanacttgcaggagactttcaccgaggacccagggttcttcatttcaggcccanactggagcagttgcacttgggactggacacctgtagctgctgccaccacgaanaggaacctccaagg

SEQ ID NO: 808 - DNA, 504 bp, Homo sapiens
  misc_feature 277, 356, 396, 417, 425, 438, 458, 473, 485: n = A,T,C or G
aaatcatagtttgttttacctgaaagttgagaaagaatgcagtataaatatagcttttctctacacgggagcagggggaacagaaccaatccccagcttagccacacccaacatcatggaaattactgggaacctgttgtctcttgaggacaactaaaaccaaaacgaaatccctaacattattaaaatgttaggaaacttttcaggtaattgctgtaactctggtaaaatacagaaagattacattcactcataataaaaatcaagtgtgcccacnccatctgcaaagggaacttgcaccatcttggtttcactcgcattgttaacagtgccctaaaagtatacacctttttcangataaaaccattaggtaatatcttgatcatatcctctgcntgaagaactatcactcaaatnattctggnatgggttaccttnctaaccctggcaaagagatnattaaatgataattntaacaggggatnggagaaacttgcaaacctt

SEQ ID NO: 809 - DNA, 501 bp, Homo sapiens
  misc_feature 97, 114, 126, 135, 145, 151, 162, 211, 215, 224, 236, 241,263, 285, 307, 309, 326, 338, 351, 378, 379, 385, 397, 403,406, 432, 445, 447, 453, 457, 473: n = A,T,C or G
aaagatgctgttaatgaacattacggacaattcatggtgtggctagttggtaacacttcagctgatttttcttatgagatggaaaaaaaaaaatcanccaagtaagggcacatnttcagttcattnaaaagtcancatccaaggngaaaanaaattctcttnttggacttgacatcactcccatcctctgatactcgcctactctcttctnaaanaagttagtntttccttccagngaaanattctccataaagtcaaatggnttctctactctgaaaaccttgntaaaacccagttccacctaaantnttgtctgccccaaaacntcaaatgtattngcttcatttaaanggcaatttcattccccaattaaccttnncaaggncaaaggaccctntgggcnggnaacccccccttaaagggggaaatttncaaccacaccttngngggccngttnccttagtggatatccnagctcgggccccaaagcttgggcgaaaa

SEQ ID NO: 810 - DNA, 554 bp, Homo sapiens
  misc_feature 397, 439, 486, 493, 500, 519, 522, 528, 539, 542: n = A,T,C or G
ccaaagctgtagctgagggaatacctaaacttcgaattgaagaatgtgctgcccgaagacaagctagaatagattctggttctgaagtaattgttggagtaaataagtaccagttggaaaaagaagacgctgtagaagttctggcaattgataatacttcagtgcgaaacaggcagattgaaaaacttaagaagatcaaatccagcagggatcaagctttggctgaacattgtcttgctgcactaaccgaatgtgctgctagcggagatggaaatatcctggctcttgcagtggatgcatctcgggcaagatgtacagtgggagaaatcacagatgccctgaaaaaggtatttggtgaacataaagcgaatgatcgaatggtgagtggagcatatcnccaggaatttggagaaagtaaagagataacatctgctatcanaagggttcattaaattcatggaacgtgaaggccgcaggcttctcttntttgtancaaaaangggacaaaatgacctcggnctngacccnctaggggaatnccncccactgcggcc

SEQ ID NO: 811 - DNA, 377 bp, Homo sapiens
  misc_feature 189, 190, 234, 249, 273, 326: n = A,T,C or G
aaatactgggggccattaagagtggatgtagctaagagcttagctaacattgccttttcactctatttttctcagatattgtaagcattctgtttttcaatattgtagttaattttttggctttcaacagcagccctagtaatgggggagttggtaattaatgtgtatattgtactgaatttctgtcanntaaggggttcactgctttggtggaaattggtggaaattgctagncaggttccacgatgnttatttttttctccatggttgggntatcattacccatttcacatacgcgtttctatttttcttcctctcctcctgancttcttaaaaatgaattttagagttgggggggtttttccccttctcttttg

SEQ ID NO: 812 - DNA, 511 bp, Homo sapiens
  misc_feature 323, 363, 367, 370, 376, 382, 386, 392, 393, 410, 430, 433,442, 459, 461, 477, 493, 499, 503: n = A,T,C or G
ccagtcctacaaccagtattctcagagataccatcagagaacaaacactaatgttaattgcccaattgagtgcttcatgcctttagatgtacaggctgacagagaagattcccgagagtaaatcatctttccaatccagaggaacaagcatgtctctctgccaagatccatctaaactggagtgatgttagcagacccagcttagagttcttctttctttcttaagccctttgctctggaggaagttctccagcttcagctcaactcacagcttctccaagcatcaccctgggagtttcctgagggttttctcataaatgaanggctgcacattgcccgttctgcttgcaagtattcaatacncggncangtattntacctngggncgcganncacccttaaggggcganttcccagcacactggcgggncgnttacttaangggatcccgaggcttcngntacccaaactttgggnggtaaatcaatgggcnattagnttgncccccccg

SEQ ID NO: 813 - DNA, 234 bp, Homo sapiens
aaaaaaaggaaaggaaagagaggaaaagaaaataaaataagacgatttattgcttctcctcagcatcctccttggtctcctccttcaccgagagagcttctagcttttccgccactttttcggcatgatcatttttgcctgatcctttcttttctctctcttcgatctctttcctgcattcttcaaactttgttttgaatttctgtgcattctcagcattcaggaagcggatgg

SEQ ID NO: 814 - DNA, 258 bp, Homo sapiens
  misc_feature 130, 150, 155, 173, 188, 192, 200, 205, 207, 230, 236, 237,241, 250, 251: n = A,T,C or G
aaaagaattaaataaaaacctgagaagtctaacgtgaagctaggactcctgcctgcttcccttcaggcacctgctgtgcctccttctccgcagatgctctggttggaagcctcctgcactgccttctgtnacaagcaccaagcctggacngttgnctttgaaattggcaccanttcttggtggttccntggnctggaagncccgnancttccttccatttgggccccccnatcttnncaangggcccagnnaaacaaa

SEQ ID NO: 815 - DNA, 145 bp, Homo sapiens
  misc_feature 19, 67, 114, 133, 137, 138: n = A,T,C or G
gtcaccagcacttcctcancatccacaggtcacgccacccctcttcatgtcaccagcccttcctcancatccagaggtgacaccagcactcttcctgtcacctgaagcttcctnagcatccaccggtcacacnaccnntcttcct

SEQ ID NO: 816 - DNA, 231 bp, Homo sapiens
  misc_feature 61, 88, 90, 97, 101, 106, 152, 165, 175, 185, 216, 222, 223: n = A,T,C or G
aaaaattttttaacttttgtgtcaaataggagttgaggaattgagcaggattctaccctantccgattgtatagaaaaaccccttttnantcaaggnttanttttnattatttcaggttttgacttgttcttttcagaaagctaaagtcaanaggaatgggggcntggggccacntcctttggancttcttaaaatcttacagacaaagctgtggnaaatgnntaagatgg

SEQ ID NO: 817 - DNA, 238 bp, Homo sapiens
  misc_feature 175, 197, 199, 215, 232, 233: n = A,T,C or G
aaaaccagattttcacctgaggcgtcaaccagatgtcacctctgcttaaaactccaactgcaaggctggcaagcagcacagaggaagtgcagatccttcctgtgtcactccaggcccagaggaactgagaagccacctgctgttccggccctttgggctgtttgggaaaagccancagtcagagtgccagcttcaantntctgattatccccctnctggggccctggtagtnnacagg

SEQ ID NO: 818 - DNA, 124 bp, Homo sapiens
cgagcaggaggcgccatcatgggagtggacatccgccataacaaggaccgaaaggttcggcgcaaggagcccaagagccaggatatctacctgaggctgttggtcaagttatacaggtttctgg

SEQ ID NO: 819 - DNA, 451 bp, Homo sapiens
  misc_feature 443, 446: n = A,T,C or G
cctatgcatagttaataaggttataatctactcaacatggaaaatggagcctatttgcaaacacacaagtaattaaagtaccaattctctcttagtttctttttttatagttggtttattttgcaattataaatgttaaacatccctagagatgaaagttaaaatggttgatcacagatcagtagcaaaatacaaattgacaattcaaaattataaataaaactctgttgaggatgtttaactttgagtctccaaatttaagagctaagcttggaagaaacaaatttataggttatatttccctcttaaattaaaaaacaaacttcctctggcagtagtttgtgaattcctttcattgtaatgataccatgattacaggatcaaaaatgcttaacttacttgccattctgctcacatcatcacagttgttttttttttttaangcnctcaa

SEQ ID NO: 820 - DNA, 476 bp, Homo sapiens
  misc_feature 160, 407, 415, 432, 439, 444, 461: n = A,T,C or G
ccttcgagagtgacctggctgcccaccaggaccgtgtggagcagattgccgccatcgcacaggagctcaatgagctggactattatgactcacccagtgtcaacgcccgttgccaaaagatctgtgatcagtgggacaatctggggggccctaacttaanaacgaagggaagctctggacggaccgagaaactgctggagaccattgaccagctgtacttggagtatgccaagcgggctgcacccttcaacaactggatggagggggccatggaggacctgcaggacaccttcattgtgcacaccattgaggagatccagggactgaccacagcccatgagcagttcaaggccaccctcccttgatgcccacaaggagcgcctggacctgcccgggcggcccgttcnaaagggcnaattccaccacactggnggccgtnactantggatcccaactcggancaaactttggcgtaa

SEQ ID NO: 821 - DNA, 466 bp, Homo sapiens
  misc_feature 152, 191, 208, 254, 262, 288, 385, 386, 392, 397, 408, 426,433, 450, 454, 456, 460: n = A,T,C or G
ccttgaagggccattagacctgataaattatatagacgttgcccagcaagatggaaagttgccttttgttcctccggaggaagaatttattatgggagtttccaagtatggcataaaagtatcaacatcagatcaatatgatgttttgacangcatgctctctactttaataatccggatggtgtgttacnatgacggtctgggggcngggaaaaagcttactggctctgaagaccacagatgcaagcaatgangaatacancctgtgggtttatcaagtgcaacagnctggaacaagcacaagccatttgcaaggttttatccacccgcttttgactctgtattaacatctgagaaaccctgaatcctgcaattcaagtagaanntcaacntcatntgaaagttcanctgttttcaaaacctgcnatgcttnaaaatgttatcccaaanaatncnaaangcttcc

SEQ ID NO: 822 - DNA, 487 bp, Homo sapiens
  misc_feature 311, 344, 353, 359, 373, 387, 393, 408, 413, 418, 422, 439,442, 447, 452, 456, 464, 470, 479, 481: n = A,T,C or G
aaaaagaaaaaaaaagccaaatacattttctgacattgtaagattgccttactgtctgtcattccttattgctggcccctttctcaggccggaggccaagtggtggagaaggaaaggaaatgatcgaacgggcatgttgtcaaagtgggcatgccactgggaaataccaccagtttaccctgaaacattgtcctcagaggagtaggaaagtggattttgaatctctattttgctcaaaagttcagttcctgagatactgatgactgagagtgctgctgggaaattttcaggattgtgtggtcttttggggntttttgttttttttttaaaacaaagttgaccgntgttcactntccacntgatcagttgtaanattacaatgctgcntgctanttggttacataaaanacaanttcancganggaaggcggttataatnggntgggnggggngtcnaaaatggncttccnttttttagnanacccca

SEQ ID NO: 823 - DNA, 525 bp, Homo sapiens
  misc_feature 176, 220, 252, 282, 301, 365, 369, 386, 393, 394, 401, 415,427, 436, 448, 469, 476, 478, 497, 500, 514, 515, 516: n = A,T,C or G
ccagaagctgaaccttattcacagtgaaatcagtaatttagccggctttgaggtggaggccataatcaatcctaccaatgctgacattgaccttaaagatgacctaggaaacacgctggagaagaaaggtggcaaggagtttgtggaagctgtcctggaactccggaaaaaagaanggcccttggaagtagctggagctgctgtcagcgcaggccatggnctgcctgccaagtttgtgatccactgtaatantccagtttggggtgcagacaagttgtgaanaacttctggaaaagacagntgaaaaactgcttggcctggcttgatgataagaaactgaaatccattgcatttccatccatcgncagncgcaggaaccggttttncaaagcnnacagcanctcagctgattctnaaggcctctccngttacttcntgtctacaatgncctcttccatcaaaaccgggntcctttntnctttttgacaccgagacantangcattctatgtccnnngaatgggac

SEQ ID NO: 824 - DNA, 317 bp, Homo sapiens
  misc_feature 107, 116, 119, 123, 126, 137, 144, 151, 156, 163, 182, 259,273, 275, 294, 304, 310, 312: n = A,T,C or G
aaaaaataaatcactcaataggcttaagaaaaatactttagttcatagttcattgatctgacgttttgatttaagatcaggggatgaatccaggatgaaaaccaaanaaaaaaaanganaaanaangaaaaatatanaagtgantcatttnccatngaaaaanggcatttccagcctcaacntaacctcaactagtttttattgcattatttttgaaatgccaagaaactggctttggacctgcccgggcggtcgctcnaagggcgaattccncncacttggcggccgttactnggtggatccnagctcngnaccta

SEQ ID NO: 825 - DNA, 242 bp, Homo sapiens
  misc_feature 61, 139, 140, 170, 181, 184, 190, 193, 204, 213, 216, 218: n = A,T,C or G
ccatggctaggtttatagatagttgggtggttggtgtaaatgagtgaggcaggagtccgangaggttagttgtggcaataaaaatgattaaggatactagtataagagatcaggttcgtcctttagtgttgtgtatggnnatcatttgttttgagggtagtttgattacncattgttgggnggngattanccngttggttcatnagatatttncangnggggatcaatacagggggaaatac

SEQ ID NO: 826 - DNA, 348 bp, Homo sapiens
  misc_feature 124, 150, 163, 192, 203, 230, 241, 253, 256, 269, 272, 279,288, 290, 297, 307, 320, 321, 332, 333, 340: n = A,T,C or G
cctgccgtgccccgttttgtgggcctgtacttgaaacactgaacgtgatgtgtccttcactcacccgcagcactttaatccccacaacagccctgtgaggtaggaatcaccaccattccccccnactcatattacagatgggggaaaccnagacacacatttnacaaagcgcgcatcacatggggagttcanggttagcctgnagtacgaacacactttctccccatggnccagtcagcanacccctggcctnttncccctccttttanaanccccatnatcagcatncntaaaaanctaacccttnattttccccgaanncccctgcatannacagttnccttccta

SEQ ID NO: 827 - DNA, 349 bp, Homo sapiens
  misc_feature 144, 174, 226, 228, 237, 243, 270, 288, 313, 319: n = A,T,C or G
aaaaaaattataaccttgattgcttattacaaaaaaattcagtacaaaagttcaatatattgaaaaatgcttttcccctccctcacagcaccgttttatatatagcagagaataatgaagagattgctagtctagatggggcantcttcaaattacaccaagacgcacagtggnttatttaccctcccctcctcataagaacttaaaaaaaaagaaaaaacacccntncaaaaaaantcaaanaatttgaggaaccccttccaaacagtncacagttattaagttcangtggtcaataattcacatcttgcancaaagngtatggacatgatttctttttcaaaacttt

SEQ ID NO: 828 - DNA, 191 bp, Homo sapiens
  misc_feature 150, 167, 182, 183: n = A,T,C or G
aaacatttgttaagaatcctttctcatgaatctctgaatatttggaatgtatttatggagtcattaaaatataattctgggaagaaaccaagaaattaacatttttattctatatggctttataaatctaggtcttctgggtcattaaangtattaagcttcagtgnctttttttttttttnngccctaaa

SEQ ID NO: 829 - DNA, 447 bp, Homo sapiens
  misc_feature 249, 280, 322, 337, 413: n = A,T,C or G
cctctcatttttagttaatcacgatttctctcctcttgagatcctctggaccttctccatctacctggagtccgtggctatccttccgcagctgtttatgatcagcaagactggggaggccgagaccatcaccacccactacctgttcttcctggcctctatcgtgctttgtatcttgtcaactggatctggcgcttctactttgagggcttctttgacctcattgctgtggtggccggcgtagtccanaccatcctatactgtgacttcttctacttgnacattacaaaagtactcaagggaaagaagctcagtttgcccngcataagtgccaaanaccatcaccagcatctgtccttcagggtgctcggacagaattcttaccacagcaaaagcataagatgcttgatacngaaaatcagaaacttaactcttttgttgcagatg

SEQ ID NO: 830 - DNA, 548 bp, Homo sapiens
  misc_feature 405, 417, 430, 440, 449, 451, 461, 465, 469, 485, 500, 515,516, 518, 542: n = A,T,C or G
aaaactgaaatacctcttaaaataatttgatccccagtgtttgctctttttgaagtaaccaacttactcttaaaaaggatggctgccaagatggaaagtcttactgggttttcatgttaacctattctttggacataactatgaattttgtatacaatgcacttcatgaaaagttgtggctcccccagattgcccacaagtgtgatcttgaagtcctaaacatttgtccatgtaagcttcaaaacagcgttaactgagttattcaagtagcaagtacttaaagatacaattcttgaagcagtttcaatggtttctgatccaaataatcagtttctgacattactacttcacataatagaagccatcttcagtttcttcttcactttctcttttccttttgggttncctttttgtggnctgaaggccccantcttttgggnactatcaananacttccattnatgnggtncactggaaaacataanggttggggattgacntgcctaccttggccnncncttaatctctaaaaaatcaatganaaaggg

SEQ ID NO: 831 - DNA, 183 bp, Homo sapiens
cctccaggacctcagtgcaagggaagaaggaaaaaagagaaaaaaggtgacagaaagagaaagatagaactggtggttggggttctgggcagcccatgcttcagcccctgcaagctgatggtaccgagcatgagactgtgaggtacgggccccatcacatggtgctaacataatctgcgaagg

SEQ ID NO: 832 - DNA, 169 bp, Homo sapiens
aaactgtcgtgtgagaaacttttatattaggccatttggattttattaagtgctaaggaaagagggcttacaaaatgtttcgtaaatattttatactgtttaagtgttaaacaccaaccctgtctttcttttgggttgagcttttttagaaagtcgaagtgaatgttgg

SEQ ID NO: 833 - DNA, 351 bp, Homo sapiens
  misc_feature 16, 207, 316: n = A,T,C or G
ccatgttgttgggcanctgtccacccatggataggatcacaccttcagggttctcgagctcatagatgtccatcaccacctcaaaagagatctcatcaaagtagagtcgatcacacatgtcatagtcggtgctgactgtctctgggttatagttcaccatgatggtcttatatcccatctttcggagctgctggatgcagcctacancacaccagtcaaattcaacgctagagccaatacggtagacgccagagccaaggactaggacatgaggtgttcgaaaggtgaggtcatgggtggtgccccaatacgttangtattagggaatttgtctgggctggaccttcggcc

SEQ ID NO: 834 - DNA, 478 bp, Homo sapiens
  misc_feature 356, 389, 397, 405, 415, 418, 421, 428, 442, 445, 463, 469: n = A,T,C or G
aaaataagttactggtaaatggagttgcattctatagtcacttgataaatattaacaaaatatttataactggaaccttaatgaaatgtatcatcaaatcaggtaaaagcaacttgtccgcagttaccaaagcctagatacgcgttagatgcgccttttccggtctgtgcgtttgctctggttcctctcaggcagcaaagctggggaaggaagctcaggcaggagcctccccgacgccacaacggcacaagcagcagctaaagcaccgcactttgctctgctaaccttttcttaaatgaggttttgccaaatccacatctggaaccgcgtccacccattttgcaaggatgtttgtnctttgatgaaactgcatctctactgcacatganggcttttnatttgtanggacaagaangangangttccgnttatttttgtaacntgntttacattggttccgatntaagtnaaattcggg

SEQ ID NO: 835 - DNA, 421 bp, Homo sapiens
  misc_feature 147, 186, 208, 239, 278, 280, 316, 376, 384, 392, 398, 401,410, 412: n = A,T,C or G
cctggagtccaataaccaccccctcataccacaccctgtgcatacaccagccaagcctttcctggtctgggaagggaagagaaaaaagacgcaggccacctgggggttctgcagtctttggtcagtccagctttctatcttagctgnctttggcttccgcagtgtaaaccttgcctgcccggaggnaggaggcccagctggacctccnagggccatgagcaggcagcagccatcttggnctcaagcttgcctttcccttgagtccctctctcccctcngntctagccagaggtgtagcctgcagatctatgaaganaagaactgggggaggaggatgaaggacctcggccgcgaccaccctaagggcgaaattcancacactgncggccgtnactagnggntcctagctngnaccaatctt

SEQ ID NO: 836 - DNA, 515 bp, Homo sapiens
  misc_feature 223, 299, 303, 336, 366, 373, 379, 387, 397, 406, 425, 433,439, 444, 446, 456, 479, 482, 503, 505, 507: n = A,T,C or G
tgaacacagaggactcaccatggagtttgggctgagctgggttttcctcgttgctcttttaagaggtgtccagtgtcaggtgcagctggtggagtctgggggaggcgtggtccacctgggaggtccctgaaactctcctgtgcagcctctggattcaccttcagtagttatgctatgcactgggtccgccaggctccaggcaaggggctagagtgggtggcanttatagtatttgatggaaataataaatactatgcagactccgtgaagggccgattcaccatctccagagacaattncaanaacacgcttgtctctgcaaatgaacagcctganaagctgaggacaccggctgtgtattacttntgccganacaccngggggtcnattgcctttntgaatggtnctgggggggcccaaagggnacaaattngggtcnacccntntttttttccngccctccccaccccaaagggggngcncccattccgagtgtctttttncncncctatggg

SEQ ID NO: 837 - DNA, 416 bp, Homo sapiens
  misc_feature 2, 3, 70, 90, 111, 132, 197, 230, 240, 253, 255, 287, 292,294, 298, 305, 307, 319, 329, 334, 337, 349, 359, 360, 364,370, 385, 387, 390, 399, 405, 408: n = A,T,C or G
gnngacacactcaccctggaggagagggtccacttcaaacagcggatcaccgcagacctgctgtccaacngcatcggcgtgtacccccanaaggaatttgatgaggactcngaggaccggctggtgaacganaagttcccggacatgatccatttcttgtggtgggcagtgaccaccattaccaggtcaacggtaanaaggattctttggaggaagaccaaagggggggnaccatccaanttgaaaaacaccncncactgtcgagtttgcctacctgcgggaccttntcatnangacngcacatncnaaacattcaaangacattaccnactantcnttcacttttaangcctaccctnnttgnaaaccnccttaactatgggcntngtnttcctttgnaccctngtnccttatcc

SEQ ID NO: 838 - DNA, 58 bp, Homo sapiens
  misc_feature 5, 32, 37, 38, 45, 48, 54: n = A,T,C or G
ctgantcaagccaaaaaaaaaaaaacccaaancaaannaaaaaancanttaagncctt

SEQ ID NO: 839 - DNA, 193 bp, Homo sapiens
  misc_feature 125, 131: n = A,T,C or G
gggtggtttgcttaggcgcagacggggaagcggagccaacatgccagtggcccggagctgggtttgtcgcaaaacttatgtgaccccgcggagacccttcgagaaatctcgtctcgaccaaaaanttgaancttgatcggtgagtatgggctccggaacaaacgtgaggtctggagggtcaaatttaccctgg

SEQ ID NO: 840 - DNA, 468 bp, Homo sapiens
  misc_feature 129, 130, 301, 315, 336, 342, 450, 451, 455: n = A,T,C or G
cctcgaaagtgctccgcgtaaactacacgttgaaagtggacgtgttattggcatttcattcaaatccatgaggagaaaaaactacgggaggaaatcttacaacaccattgctgccaccacctgcaaggnncagctttctcactaggatggaaaagaagcgtttctgaggaacaattcacattagtacaaaaaaatgatacagccatttccaaagagcagagtaatgatcacaatggcagtttcgaggaatccagggtcagtcctcacacgggcctcacccagcctctcccgagtggcgacngcgctgagagccanaaagggggcaacgcgaagacnagtttntagcgacccttgggaaaagcctacgctacacatttcagaggagattaaaacattccatatgccatttaactttaacctaaaaaaaatatagtgggagggaacctttgnnttcngagaaattcaaag

SEQ ID NO: 841 - DNA, 449 bp, Homo sapiens
  misc_feature 135, 138, 271, 303, 380, 381, 390, 413, 432, 439, 446: n = A,T,C or G
ccatcagcagaccaggccagggaggtgcactggggtggttctgccttgctgctggtactgataacttcttgcttcagttcatctacaatgatctttccctctaaatcccagatcttgatgctggggccttgtggnacnacacagccagtagcggttagggctgaagcacagggcgttgatgatgtccccaccatctagcgtgtaaaggtgtttgccttcgttgagatcccataacatggcctggcctttatcctaactatctgaatcccantagtggacagtggggtcaacatcatgtatcanttggaggacttggagacagcttctatgagtatttgctgaaggacctcgggcgcgaccaccctaagggcgaattccannacactgcgngccgttactaattggatcccaanctcggtccaacctttgcgnaatcatnggtcatntct

SEQ ID NO: 842 - DNA, 177 bp, Homo sapiens
  misc_feature 121: n = A,T,C or G
ccaacgggggcatccactacatcacccttgatggccgtgtctacgacctgcatggctcctgctcctatgtcttggcccaagtctgccacccaaagcctggggacgaggacttttccatcgngcttgaaaaaaaatgcagcttggagatctccaacgcctcctggttactgtggctgg

SEQ ID NO: 843 - DNA, 123 bp, Homo sapiens
  misc_feature 58, 70, 92, 117: n = A,T,C or G
cctccacgctgagtgaccttgaggaaccctgggagctcaggaaggaaggagcacccanaagcagggacanggagctggttggggaggaccanaaatcaggttatcaatacttttggntgacca

SEQ ID NO: 844 - DNA, 507 bp, Homo sapiens
  misc_feature 123, 197, 228, 328, 364, 398, 401, 404, 418, 430, 434, 449,459, 466, 479, 482, 490, 497, 501: n = A,T,C or G
cctgttctgggagatggtcatattcacctgccaaaatctgctggaatcctttgatggtctccttcaggggtaccagcttccccatatgacctgtgaagacctcagcaacctggaatgggtganacaaaaaacccttgtattttccgtgcacgggacacggtcaacttgtcttcctcagaaagttcatccatacccangatggcaatgatatcctggagggatttgtantcctgcaggatcttttgcaccccacgggcaacatctaatgctcactgccaacaatgttgggatccatgatacgagaggtggagtctagaggatccacagntggatagatgcccagctcagcaatggcacgcgacantacattggttgcattccaaatgggcaaaccgttntancanggggcaggggtcangtcaagttatcnagcnggcacatagatagcnctgtacagangggatanatccctttttgtnagngggaaatntttctgntacnacccat

SEQ ID NO: 845 - DNA, 434 bp, Homo sapiens
  misc_feature 159, 268, 310, 352, 362, 363, 384, 390, 393, 404, 405, 417,419, 425, 427: n = A,T,C or G
ccttatttctcttgtcctttcgtacagggaggaatttgaagtagatagaaaccgacctggattactccggtctgaactcagatcacgtaggactttaatcgttgaacaaacgaacctttaatagcggctgcaccatcgggatgtcctgatccaacatcnaggtcgtaaaccctattgttgatatggactctagaataggattgcgctgttatccctagggtaacttgttccgttggtcaagttattggatcaattgagtatagtagtncgctttgactggtgaagtcttagcattgtactgctcggaggntgggttctgctccgaggtcgccccaccgaaatttttaattgnaggtttggannttttaggacctgtggggtttngtaggnacntggctcgcatnntatacgattaananctccantnggggctt

SEQ ID NO: 846 - DNA, 317 bp, Homo sapiens
  misc_feature 102, 123, 129, 172, 199, 212, 224, 286: n = A,T,C or G
ccaggcgtctgcgaaatcatatggctgtagcattcgtgctatccctgggggttgcagctttgtataagtttcgtgtggctgatcaaagaaagaaggcatacncagatttctacagaaactacnatgtcnttgaaagattttgaggagatgaaggaaggctggtatctttcanagtgtaaagtaatcttggaatataaanaatttcttcaggntgaattacctanaagttttgtcactgactcgtgttcctgaactatgacacatgaatatgtgggctaagaaatanttcctcttgataaataaacaatttacaaact

SEQ ID NO: 847 - DNA, 464 bp, Homo sapiens
  misc_feature 66, 133, 228, 301, 318, 344, 363, 384, 397, 403, 428, 456: n = A,T,C or G
aaaaaccacttgactagcgactgtactgtttcctcgtggttcaggggtgtgcatgaaggctcttangagagcaaacacctgttcctactctgtatgtccctccctcatttcaaatgagaagtaaccaatttgngtaaaaataaccaaataaccattgccccaccatgaacatggggcttgggaagacagtcctacaatcttcatcatatatttaggtttttaggccanccagctctttttttccaaagctttcttttgaatgttcagatcctattttaatcctaactatagactactgtgnttgtgagggtgtctgantgtctatgtgagggcaaggacaacantgcagtccaataaacacanaaaaaattgctttttttgcanctgaagctctgtnttgganatttcatttttgttactgggacagngcttaattcattcccaaagtcctttggnaacacctg

SEQ ID NO: 848 - DNA, 561 bp, Homo sapiens
  misc_feature 374, 388, 474, 476, 504, 507, 544, 545, 547: n = A,T,C or G
aaaggagattcccaggagctgctacatgacacttactgttgactagagtttagtcacaaaatttatttgcgaaggagtctgtgaactgtagtctttattcttgggctcaaaatcagaggctgtattacaaaggaagaaaagagtgtattcaggggagcaactagcttcctgtgcacagaatccaagggcagagggtgttctgaaaggggggatgtgtcagtatcacaaaaacaatcaagaagtcaagaaaggtagcaatgaaatgcccagtggatttaggggcaagaaagtccagtggcaacttggtgaggatgatggcaattatccatctgaccccagaacccttgattctgagtgcctaatgttttccagantcagcttttgctantggatggggcagaaagacagaagtgttggagttgagggtggttggacccaagagtgcaaatccaggcccaggtgacagtacaccgncnggaatggaaatgagggattaaagggctntanaaaaccaaaaggactgctgttaaaggacaggattgannangaaggagaccccct

SEQ ID NO: 849 - DNA, 428 bp, Homo sapiens
  misc_feature 127, 138: n = A,T,C or G
ccttggcatatgccccaatcaacagctgctgttttcctggaatagtccttgagtaatcccgcaggtacttggagagttccatctcaatggccccgccaccagccaccactgaatcattcttgatggnccctcctgacnatcatgatggcatcatgcagggaccgctctgtctcctccataaactgctcggcgccgccacggagaatgaaggtgcatgtcttggccttggggcagccagtaaaaaaattgtacctctcgcctccaatctgggtctcttcaaacacctggcatcgacccagcacatctgctgacagagcattcacactggtctggattgagcctccacaggccatcattgtcctcttcagatcctcctcaggtactcggccagcacagaacatgttcctgtcagcaaagtactgggtggg

SEQ ID NO: 850 - DNA, 391 bp, Homo sapiens
aaatactgggggccattaagagtggatgtagctaagagcttagctaacattgccttttcactctatttttctcagatattgtaagcattctgtttttcaatattgtagttaattttttggctttcaacaagcagccctagtaatggtggagttgttaattaatgtgtatattgtactgaatttctgtcagttaaggggttcactgctttggtggaaattggtggaaattgctagcaggttccacgatgtttatttttttctccatgttgtatatcattaccatttcacatacgcgtttctatttttcttcctctcctcctgatctccttaaaaatgaatctagagttggtggctttttccccctcctctttggacctcggcccgcgaccac

SEQ ID NO: 851 - DNA, 329 bp, Homo sapiens
  misc_feature 26, 56, 62, 106, 130, 139, 161, 163, 185, 202, 214, 235,259, 262, 287, 293, 306, 310, 315: n = A,T,C or G
ccaccgggatagccgggggtctggcnggaatgggaggcatccagaacgagaagganaccatncaaagcctgaacgaccgcctggcctcttacctggacagagtgangagcctggagacctagaaccagangcttggaanagcaaaatccgggagcacttgnanaagaagggaccccaggtcaganactggagccattacttnaagatcatcgangacctgagggctcagatcttngcaaatactgtggacaatgcccgnatngttctgcagattgacaatgcccgtnttgctnctgatgactttanagtnaagtntgagacagagctgg

SEQ ID NO: 852 - DNA, 279 bp, Homo sapiens
  misc_feature 125: n = A,T,C or G
ccttccttgccaggacctagagtttgttcagttccaccctacaggcacatatggtgctggttgtctcattacggaaggatgtcgtggagagggaggcattctcattaacagtcaaggcgaaaggnttaatggagcgaatacgccccatcgcgaaggacctggcgtctagagatgtggtgtctcggtggatgactctggagatccgcgaaggaagaggctgtggccctgagaaagatcacgtctacctgcagctgcaccacctacctccagagcagctgg

SEQ ID NO: 853 - DNA, 267 bp, Homo sapiens
  misc_feature 140, 241, 258: n = A,T,C or G
catggctaggtttatagatagttgggtggttggtgtaaatgagtgaggcaggagtccgaggaggttagttgtggcaataaaaatgattaaggatactagtataagagatcaggttcgtcctttagtgtttggggattggnaattatttgttttgaggttagtttgattagtcattgttgggtggtgattagtcggttgttgatgagatatttggaggtggggatcaatagagggggaaatngaatgatcagtactgcngcgggtatg

SEQ ID NO: 854 - DNA, 335 bp, Homo sapiens
  misc_feature 143, 145: n = A,T,C or G
aaaagctcttggtaggattagttggttctaaggatccctctagggacctcattatttcaagaggaacccaaagtccagcctcctacatagatgctgccccacgaaggacccacaaaactaacctattttcagggttctcaggnangcagttctgcttcagcttagagcagaacccataaaatactcaagtactgggataggcaaagcatgtgtgtttactgtggattggtccctgaaggctcctttgggtgagaacatgtgaaccaggcaccctggtttgtttggagcattgctgcccacaagcttctatgggataggtggcgcttgggattgat

SEQ ID NO: 855 - DNA, 348 bp, Homo sapiens
  misc_feature 314: n = A,T,C or G
cctcgggcacacagccggcgcccagtcacccggcccagatggagggcggccgggccctgcacaggcacttgccaaggtggctcacactcacgcacactcgtactgagactcaaggccgtctccacaacttccaaccagtgcaaatgacttagtgcaaataaaattcagaagggacgggggaaacagagtcgtggaggctttgaatctctcagaaaaaaggaaagacaggaaagctcagaaacaaagagacagaaggatgaaaaagaagaagagggaggtggtggggacggcgtcatcccgctggaggagctcanctctgggatgatgtggtggctggtggtcaaccgt

SEQ ID NO: 856 - DNA, 371 bp, Homo sapiens
  misc_feature 162, 163, 176, 187, 193, 232, 258, 268, 270, 277, 290, 297,306, 318, 335, 341, 344, 345, 355, 362: n = A,T,C or G
ccaggatcctatgcgacaacgcggacaacatcacccgggtgcagagcgacgtgttcagggtggcggagttccctcacggctacggcagctgtgacgagatccccagggtggacctccgggtgtggcaggactgctgtgaatactgtaggaccaggggggcanntcaatgccttttncctatcatttncgaggnaaacggtctcttgagttcagctaccacgaggacaagccnacccgagaaaacaagaccactgaaantacccatttntngggaganagggggaaacatnttcaccnacaagcacnttcagtctttangcacacgctcagatgcntctggnacnntatgactttnagaggantttggttct

SEQ ID NO: 857 - DNA, 358 bp, Homo sapiens
  misc_feature 130, 131, 176, 230, 248, 275, 294, 307, 317: n = A,T,C or G
cctccctgtcgcctgggtgcccacggggctctgactttcccccgttaccagcctcgtggctgtccccggagatgctgagagtgacagcttgagagtttgattcttacataagcgggaagcagtgagaaannaccccgcccaccacgtccctccgttcctgttggcacccccccatnctaccatctgtggcccccgtgggccctgacttgctaaggcgctggcgggcatanccttgggagcactggggnacgtacatggccttgtagcacgaaggnccactccaagggtctgganctgcccgggcggncgctcgaaanggcgaattccagcacactggcgggccggtactagtggatcc

SEQ ID NO: 858 - DNA, 346 bp, Homo sapiens
  misc_feature 159, 179, 231: n = A,T,C or G
aaaccctgcgtggcaatccctgacgcaccgccgtgatgcccagggaagacagggcgacctggaagtccaactacttccttaagatcatccaactattggatgattatccgaaatgtttcattgtgggagcagaacaatgtgggctccaagcagatgcancagatccgcatgtcccttcncgggaaggctgtggtgctgatgggcaagaacaccatgatgcgcaaggccatncgagggcacctggaaaacaacccagctctggagaaactgctgcctcatatccgggggaatgtgggctttgtgttcaccaaggaggacctcactgagatcagggacatgttgctgg

SEQ ID NO: 859 - DNA, 380 bp, Homo sapiens
  misc_feature 352: n = A,T,C or G
ccttgcactgcggccaccacgctccccgctgccaccatggagggcggattggaaatgaacttcacatctgtggcacagagggcaacgaaggtctgcgcgtgtttgcggatgatctgtttgttctcctcccctcttggcattttggagaggaagtgttcaatgaaatcgtgcggggtcattgcggccaggttccacttgagcttgttcaccaggagcagctccatttgcagcagctcctcgggccggatggagttgtcggtgtagatgcacagcttctcggccgtcagggggatggtctccttcatcttagaggccacgaacatgcaagtggcccccagcagctgcaggcggntctttttcacgggctccagcgacaagga

SEQ ID NO: 860 - DNA, 328 bp, Homo sapiens
ccaccgggatagccgggggtctggcaggaatgggaggcatccagaacgagaaggagaccatgcaaagcctgaacgaccgcctggcctcttacctggacagagtgaggagcctggagaccgaaaaccggagggctggagagcaaaatccgggagcacttggagaagaagggaccccaggtcagagactggagccattacttcaagatcatcgaggacctgagggctcagatcttcgcaaatactgtggacaatgcccgcatcgttctgcagattgacaatgcccgtcttgctgctgatgactttagagtcaagtatgagacagagctgg

SEQ ID NO: 861 - DNA, 346 bp, Homo sapiens
  misc_feature 207: n = A,T,C or G
aaaccctgcgtggcaatccctgacgcaccgccgtgatgcccagggaagacagggcgacctggaagtccaactacttccttaagatcatccaactattggatgattatccgaaatgtttcattgtgggagcaagacaatgtgggctccaagcagatgcagcagatccgcatgtcccttcgcgggaaggctgtggtgctgatgggcaanaacaccatgatgcgcaaggccatccgagggcacctggaaaacaacccagctctggagaaactgctgcctcatatccgggggaatgtgggctttgtgttcaccaaggaggacctcactgagatcagggacatgttgctgg

SEQ ID NO: 862 - DNA, 209 bp, Homo sapiens
  misc_feature 123, 131, 146, 151: n = A,T,C or G
ccaacatggtgaaaccctctctccactaaaaatacaaaaattagccaggaatggtggcgggcgcctgtagtcccagctacttgggaggctgaggcaggagaatcgcttgaacccgggaggtgnaggctgcnattgagcaagatccnccacntgcactccagcctgggcaacaagagcgaaactccatctcaaaaaaaaaaaaaaaaagg

SEQ ID NO: 863 - DNA, 328 bp, Homo sapiens
ccatgtactacagcagaggcagctggctaataaaactaggttttgagggagtcatttcaaatgacagcaacaatgactgagaaagctcaatgagatgggcataggaaattcacattttattcaaaaagcaaaacttaaacatgaaatacagccaactacgctccttcctttcggcgttccgctatcttaactgctgaagaatgaaaaacaaaatgaccccagatttttcaaggtcaagtatgtcatcagacggacaacctgcaggtatcagaccctcatggaatctactttactgaagttgtcatgatgtcctgtttttgaggtattt

SEQ ID NO: 864 - DNA, 563 bp, Homo sapiens
  misc_feature 264, 279, 286, 346, 378, 421, 422, 456, 464, 471, 476, 477,491, 499, 505, 517, 520, 528, 534, 537, 538, 546, 551, 554: n = A,T,C or G
aaagcgtggggttttttaatctctgccacccttgtcaagggagtcttgtaaagttgccgagggtaggttcatctccaggtttcgggattcccatccgtcctggcgatcctgccagcagtgggtgggcagcctgagctccctcgggctcgcctgccagcctggagttcttcctgtgctccttgatcacctgagctgcctcagattccatttggtcctctccttcctggaaggcttccttttatgttttgttttaatcccaaatgnctgaatgttttgcantgtgtangggtttgagctccttgttcattctccttcctttttcctcccgcttccctctccatgaagngattctgttgacaataatgtatactgcgcgtnctcttcactggtttatctgcagaaatttctctgggcttttttnngtgttagggtcaacactgcgctaaaccgggatgntccattgnataaaanaacannggggtttacctgcncgggcggnccctcnaaaggcgaattncancacacttngggggncgnncttagggnatccnagntcggaccct

SEQ ID NO: 865 - DNA, 538 bp, Homo sapiens
  misc_feature 351, 372, 409, 422, 463, 503, 525: n = A,T,C or G
ccagaaggagatggtaagaacagccctagtaacttcatttactcctgaggctctgtgcccacaaactgattctaagagcccttcctgtatatatgcgaattagctctaagtacagacattttggtgtgaaattgtggaggttatggcaaatacagggtaggctgaatggttctaggccaggaagcaagagttcacaaatgcggtgtcttcaatgaaataaggtaagtaccttgaagcaaggagtaaccacctgactaatgcatccacatgagagactcaaatctaacacttggcaaaattacaatctgggatactgaggtccccacttttagtgaaagccaaaggccctanggtcaaaatgctaaaaaagtnttttactaactatcctaggacagctaaggtcattttngggaagaagaganaaaacactatcacccctcccttcaagttttaatagacaacnaggaatctggggcttctgaaaaagtccaaacaccttttcncaagatgatgagcaacttgganaactggaccttgc

SEQ ID NO: 866 - DNA, 534 bp, Homo sapiens
  misc_feature 152, 288, 342, 344, 383, 391, 400, 411, 427, 436, 441, 457,459, 468, 474, 483, 495, 500, 506, 508, 513: n = A,T,C or G
gaacgacctgctcagaatgagaagaggaaggagaaaaacataaaaagaggaggcaatcgctttgagccatatgccaatccaactaaaagatacagagccttcattacaaacataccttttgatgtgaaatggcagtcacttaaagacctggntaaagaaaaagctggtgaggtaacatacgtggagctcttaatggacgctgaaggaaagtcaaggggatgtgctgttgttgaattcaagatggaagagagcatgaaaaaagctgctgaagtcctaaacaatcatagnctgagcggaagaccacttgaaagtcaaagaagatcctgatggtgaacattgccngngagagcaatgccaaaaggctggaagacttggaagccagnattttgtngcaaatctngattataaagntggctggaagaaaccngaaggaagnttttnctcttggctggggggngnggtccctancagacntttttgatnataaagattgcnaaaantttttngngaatntcccctggtcatctctttgga

SEQ ID NO: 867 - DNA, 295 bp, Homo sapiens
ccagttccacagttcagttcttcctgaaaacagggatgatgaacttgtaggatcaggacaaatgtgtgtttttcaaaaacttaaggctgggtgtgaaacaccttctgtggacaaggatttgtaaacttctcttcttcctccagctgcgggccccagcctaactgatagttacttgattcagtgtgctagacacttaaatagcatctatgtctctttcaagggaatttgtcaaataatgctgtttagctaattgttgcaagcaattgcatattaacagctgtgattttgttggaca

SEQ ID NO: 868 - DNA, 461 bp, Homo sapiens
  misc_feature 141, 169, 214, 356, 367, 372, 378, 381, 399, 401, 409, 413,424, 426, 438, 451, 452: n = A,T,C or G
cctcaaaataagatgaaaaagtctcctgtgggtagctggtgttcctttttcaacttggggaaatcatcatctgtttctaaacgaaagctgcagcggaatgagagtgagccttcagagatgaaagccatggctctgaaaggnggcagggcagaaggaaccctccgttcanctaaaagtgaggagtctcttacatctctccatgcaagttgatggngattctaagctcttccgacccagaagacccagatcttccagtgatgcactgtctgcctcttttaatggagaaatgctggggaaccgctgtaactcctatgataatctgcctcatgacaatgagagtgaggaggaaggagggntgcttcatatncccancccttnatntctgctcattccagcttnanggatgttnactngagccccccananatgggaaatatnccaagcctggatnntgatgctat

SEQ ID NO: 869 - DNA, 519 bp, Homo sapiens
  misc_feature 132, 164, 435, 460, 499, 500: n = A,T,C or G
ccattacaaagacacaggaatatgttaagaagtgaggggcaggatgaaatcatctagggtaggtatttagagggagggcgccgtgcaaaataaaatcctcactatgaaacaaaggcggaggcaaggaggctngcgttaggtggaagcagcggaggaaggagacnaaagggattgtcattttcatgtcgtggctttttagaagacagccatgtcctctactctgattctatcaaaatgtgttctcggggtgctggtaacgttcagccaacgaaataattcctatggcggcagtaggaataacaaaacgcagaagcgggaacgatgtctttttattcctccccagacgcaaacgtggatgcatgaggttttggtaacaggcaaagtcatctggttaacgtgactgatgcaaaaagtcccggcctgggcaaaaagaantcactgggtgaatgggatggatcanactccctgttctgagggggagatggtttcttgcagaacnnaggtgaaaggagggggttc

SEQ ID NO: 870 - DNA, 161 bp, Homo sapiens
ccaggagccggccaaattcatgctgattgctcagatggaggaagatgcccttgtctcgaaagctcttacagaaggccatgtccgggtctgtgtcactgcccgagaacacatccctctggggcagctccatcccgcaggggtatcaccccggatcacatagg

SEQ ID NO: 871 - DNA, 536 bp, Homo sapiens
  misc_feature 283, 320, 334, 385, 441, 454, 486, 497, 500, 523: n = A,T,C or G
cctttctagaattttctttgagcaggtttacaatttagcttacatttttcgactgtgaacgtgaataggctgctttctgctttcttctttccagaccccacagtagagcacttttcacttatttgggggaggcttcagggggactgttctcaccttaactcagccagaaagatgccctagttgtgatcaaaggtaactcgaggtggagggtagccctggggcccctcgacatcaccgtcattgatggagcctgaaccgtgtgctcctcggcagatgctgttgntgttacttccctccaagaggctgggaaaagggctcanagctgcttgagcangaaccggaggggtgacccatttcaggaggtgccggtaccagccttgactangtacaggcaagcttgtgtgggcccaacaggcccttgggtaaagctggtggccaganggtgggctcaganactgggcatgatggggccaacccacctcggantccaactgatnggncctcggccgcgacccccctaaangggcgaaattcca

SEQ ID NO: 872 - DNA, 327 bp, Homo sapiens
  misc_feature 132, 133, 152, 195, 224, 234, 236, 259, 264, 275, 305, 310,318, 321: n = A,T,C or G
ccaaaggggttggggagtcacttcacattccaggctggaggagtaagaggacttgggggtactcctcccaccccattgtcagcaagaggccatgactcacctcaaccccaagtcctgcatcctggtgggaanngacaatgcctcctcccagntctccatacctaatggggtcatgaccagacagggtaggacccnggcccccagcttcagttggtaacgggggnctccacggcntnccccctgtcaccttgcccgggcngccgntcgaaagggcnaattccagcacactggcggtcgttactacnggatnccaccttnggnacccaa

SEQ ID NO: 873 - DNA, 446 bp, Homo sapiens
  misc_feature 235, 249, 255, 266, 285, 302, 313, 317, 319, 335, 341, 400,402, 404, 415, 417, 424: n = A,T,C or G
aaagccttttttaggccacattgacagtggtgggcggggagaagatagggaacactcatccctggtcgtctatctcagtgtgtgtttaacattcacagcccagaaccacagatgtgtctgggagagcctggcaaggcattcctcatcaccatcgtggtttgcaaaggttaaaacaaaaacaaaaaaccacaaaagtaaaaaacaaaaaaaacaaaaaacccaagaaaaaaaaaanagtcagcccttggnttctgnttcaaaccctnaaaaggggaagcaactccntgtgcctggggttcccnagggagcctgntggntnacctgggcccacaaancctggntttggtcccaccattgcagtatggtggtgggggtttgtaggcttgtggggtcttggctntntnggacctgcccngncggcccnttcgaaaggggaaatttccagc

SEQ ID NO: 874 - DNA, 302 bp, Homo sapiens
aaaacggtgtgtgttcggaggggtgaaagcattaagaagcccagtgccctcctggagtgagacaagggctcggccttaaggagctgaagagtctgggtagcttgtttagggtacaagaagcctgttctgtccagcttcagtgacacaagctgctttagctaaagtcccgcgggttccggcatggctaggctgagagcagggatctacctggcttctcagttctttggttggaaggagcaggaaatcagctcctattctccagtggagagatctggcctcagcttgggctagagatgccaagg

SEQ ID NO: 875 - DNA, 374 bp, Homo sapiens
aaaatactgagcggtattgaatacttcgaagcagaacaggcaatgtgcagccctcatttatgagaaaaccctcaggaaactcccagggtgatgcttggagaagctgtgagttgagctgaagctggagaacttcctccagagcaaagggcttaagaaagaaagaagaactctaagctgggtctgctaacatcactccagtttagatggatcttggcagagagacatgcttgttcctctggattggaaagatgatttactctcgggaatcttctctgtcagcctgtacatctaaaggcatgaagcactcaattgggcaattaacattagtgtttgttctctgatggtatctctgagaatactggttgtaggactgg

SEQ ID NO: 876 - DNA, 329 bp, Homo sapiens
  misc_feature 127, 152, 171, 223, 284, 287: n = A,T,C or G
ccaggcgtctgcgaaatcatatggctgtagcattcgtgctatccctgggggttgcagctttgtataagtttcgtgtggctgatcaaagaaagaaggcatacgcagatttctacagaaactacgatgncatgaaaagattttgaggagatgangaaggctggtatctttcanagtgtaaagtaatcttggaatataaagaatttcttcaggttgaattacctanaagtttgtcactgacttgtgttcctgaactatgacacatgaatatgtgggctaagaaatanttnctcttgataaaataaacaattaacaaatacttcgaaatagaa

SEQ ID NO: 877 - DNA, 538 bp, Homo sapiens
  misc_feature 422, 440, 460, 474, 484, 496, 500, 507, 520: n = A,T,C or G
cctaacaaccagtaagataattttagacaattctattgaaagttattcaaaaggcatcaagtcaaaataacgaaactgccccagtaaaaaggggctgggcctgggggccaggaaaggcaagcatgagggcccagtagagggtggacctgtccctatggtaactgagctcggctttaaggccaggcattggggatcagctgctaggagcccacctgtgttcttcctgaggggtgggggcaccctagtcactgcctagaggcacatggtcccccaccagcctacagcatggaaacacccaatgtctgctctagcctattcttaacccacaactgggatgggagctggggacaggagaaggggtcatggggccaggagcctattcaggctctacaaccagacttccctaagaggccccgtgccanttagtccaatggacctgncccggccggccgctccaaanggcgaatttcagcncacttgcggncgttactatggntccnactcggncccaacttggggnattctgggcatagtgggt

SEQ ID NO: 878 - DNA, 278 bp, Homo sapiens
cctccctacaaggctcccccctcccccgaccctttacctagggcctgccagaaaacacttcttattgtgaaggggacagaactaatgggggacagtggaggacatggatctacccccattcctgagtcacacgactcacccagagtcacggcccagactgggcctggggtcatggcgccaggttgcccctctggcctgtccacagctctcggagctcgacatgacaacccaggtcccgcagggcggccttggacctgcccggcggccgctcgaaaggg

SEQ ID NO: 879 - DNA, 231 bp, Homo sapiens
  misc_feature 228: n = A,T,C or G
aaaccttaaattaaaaaaagaaaacattttcacacagaagaattatctgctttgagaaataaagaaattagaaggtgtaaaaaaaaatttttcaaaccccaaataatgataaaaatagatgtatcctctgtaaaaaatctggactaaactattcagtcattcatggttattcagtattcagagcatgaagtgaaacaccaaagtataaaaaattaaaaaaaaaaaaangga

SEQ ID NO: 880 - DNA, 445 bp, Homo sapiens
  misc_feature 141, 401, 402, 435, 439: n = A,T,C or G
aaactcaacaaatgtcatcaaatatgttgaattgatctagaaattatttcatatataaatcagaatttttttgcatttatgaacggctgtttttctactttgtaattgtgagacattttcttggggagggaaaattggaantgggttcccttttttagaaattgaagtggtcttcatatgtcaactacagaaaaggaaaaaaatagaaattgaaggatttttatgaaattatattgcattactatttgcagtcaaactttgatccttgtttttgaaatcatttgtcaattcggaatgaaaaattataatgtaattttacattacataagtcccttttacaattaaaaaatagcacttcttcatcttatgcctgttgagaagatattaaattttcacattgnngacagtgaaatgctatgttgggtttataaagantacngaccat

SEQ ID NO: 881 - DNA, 414 bp, Homo sapiens
  misc_feature 133, 144, 163, 212, 231, 318, 338, 351, 363, 385, 392, 400: n = A,T,C or G
ccaagacagtccacttacatggatcgtgtcttcaagcaatttgtgcaagccatggttgagcatggacatgaactctcttaacatgtagttctttgggtgcattttgtctgaaccacaattgtgaaggcagctnagcttagtgcncaaattttaactggttgtntataaagcaaataagccagcagatgggtgaagaggtccataatgatatncaaaaactactttttaganaaacaaaacaactttgtagcaacaaattaaatatagtattagattgttacttacgtagattttatttttactatgccttaccaaggnacatccttaaacaaagtagnattgtcatgaaantgcacttaaccnaaactattgtgtaaaaacaaanttttaanttcctccngggtttttaattac

SEQ ID NO: 882 - DNA, 554 bp, Homo sapiens
  misc_feature 331, 416, 443, 445, 452, 463, 475, 485, 492: n = A,T,C or G
aaaaagattgtttttgtcttttggtttcttcctttctcctggagaaacgatctaccagtcaaggcaatatgtagcagatccctgggaattaaaggtttgcccatttgttcactgtatttagtccctgctacattccaggcattgtactaagtatggggaaccacagagaagacattccctcagaaactgctgcagtgctttcgcttatccctacctaaaaaaccgtcaatgtgaaatcatttccttgattataactataatgataatggattagtttatataaacctatgtttagacaagttcaagacaagcgtgtctttctataaaaagnattggaaatgaaggaaatgagatcatgtttcaatttattaaagcagggaagagcattctgtggttaagttcgtgtctaggatttngagagccttactgaatgcatttaccancnaacatgnagcaaatctgntctcttcattgngattcggggnaagaaancttatgtaaaaacgatagtcattaatgaaggaaagttatggcgtgggaccttatttctgtta

SEQ ID NO: 883 - DNA, 108 bp, Homo sapiens
aaaaactgctttagtttcatcttgaaatatatatacgtgtatatatatatttgctctagaatgatcatattgcagcatgattctcatgcatttcaaagtactttattt

SEQ ID NO: 884 - DNA, 301 bp, Homo sapiens
  misc_feature 157: n = A,T,C or G
aaatgatatacttataaacatgtaaacaactatataataaaaggtttccaaacgctgcctgtaagaaatcaggcaaattttaccataagcaataaaccattccaagccttccagacagtctccatagccgcaccagcatggcaataagctttaaccnacgaaaacaaacaaacaaaagcacttcgcaatttggttgctgcaaaacagggagagaaaagagtgtacaaacttgatggaatcacaacagtcaatataatttaagggacaataaagtcaataaggttgatggtgtttattgttt

SEQ ID NO: 885 - DNA, 136 bp, Homo sapiens
  misc_feature 113, 126: n = A,T,C or G
cctttgcttcagcatgaagtttttgatgcttagtaaggtttgtacgtcggttgaagaatctcccacattcactgcatttatagggtttctctcctgtgtgaatgatctgatgncgaataagggatnaacttcggga

SEQ ID NO: 886 - DNA, 399 bp, Homo sapiens
  misc_feature 143, 144, 214, 230, 248, 256, 261, 312, 313, 324, 327, 330,355, 361: n = A,T,C or G
cctcctccaccaatgttcagcttttttcctttccctcctttgaatcgagatttccgaaaccaggcattctgcattgccagatctaggagttccttagaaacgtgttgattggctccttccaagttccggaccaggtcacccanncaaaattgctgtccttgggaggtgagtagggtataggccacacctttctcacccgctcttcctgtgcggncaatcctatgcgttgngggtatcaatgtctcggngccacatnatagntaatgacagtcttaattgaaggaatgtccagaccacgggctgcaacatctnnggacctgcccnggnggncgctcaaagggcgaattccagcacnctggcngggacgatcctagtgggatcccgaggctccggtcccaa

SEQ ID NO: 887 - DNA, 326 bp, Homo sapiens
ccacagcaggactacagtcaagacaatcacagtctctgcggagctgcccaagccctccatctccagcaacaactccaaacccgtggaggacaaggatgctgtggccttcacctgtgaacctgaggctcagaacacaacctacctgtggtgggtaaatggtcagagcctcccagtcagtcccaggctgcagctgtccaatggcaacaggaccctcactctattcaatgtcacaagaaatgacgcaagagcctatgtatgtggaatccagaactcagtgagtgcaaaccgcagtgacccagtcaccctggatgtcctctatgggccgg

SEQ ID NO: 888 - DNA, 531 bp, Homo sapiens
  misc_feature 318, 328, 348, 362, 379, 381, 384, 421, 424, 435, 437, 441,448, 450, 456, 464, 500, 502, 505, 510, 523: n = A,T,C or G
cctacacgccgccgcttgtgctgcagccatgtctctagtgatccctgaaaagttccagcatattttgcgagtactcaacaccaacatcgatgggcggcggaaaatagcctttgccatcactgccattaagggtgtgggcccgaagatatgctcatgttggtgttgaggaaagcagacattgacctcaccaagagggcgggagaactcactgaggatgaggtggaacgtgtgatcaccattatgcagaatccacgccagtacaagatcccagactggttcttgaacagacagaaggatgtaaaggatggaaaatacagncaggttctanccaatggtctggacaacaancttcgtgaagaccnggagccgactgaagaanantcnggcccatagagggctgcgttactttttggggccttcntgnccgagggccancnacanccaaaancncttggncgcccgcnggccgcacccgtggggtggtggttccaaaaaaaaananaanttttntaggaacctttcngggggcga

SEQ ID NO: 889 - DNA, 581 bp, Homo sapiens
  misc_feature 317, 355, 390, 412, 420, 432, 453, 465, 479, 493, 494, 506,512, 515, 541, 550, 551, 563, 565, 568, 579: n = A,T,C or G
ccaacggggccctcaaagtctccgtctggagtaaggtgctgcggagcgacgcggcctgggaggataaggatgaatttttagatgtgatctactggttccgacagatcattgctgtggtcctgggtgtcatttggggagttttgccattacgagggttcttgggaatagcaggattctgcctgatcaatgcaggagtcctgtacctctacttcagcaattacctacagattgatgaggaagaatatggtggcacgtgggagctcacgaaggaagggtttatgacctcttttgccttgttcatggtcatttggatcatnttttacactgccatccattatgactgatggtgtacagntcccaagtgctccctatccagtccaaaggaccctnttgattacagcacagggaactngatcgttnggggaaccccanccccttggaacttggaagacncgtgttttctgnaccccgaatcaacngtgttgggcatcanngttttctgcaangggttngancctgaaaacttttacctgcccgggcngcccgctcnnagggggaattcncnacncttggcggtcntt

SEQ ID NO: 890 - DNA, 180 bp, Homo sapiens
aaaagctatgttgttagcacacagaacacttcattgttgtttttgggggaaggggcatatgtcactaatagaatgtctccaaagctggattgatgtggagaaaacacctttcccttctagttttgagagacttcctcttggctcccaggaggagggattccctgactttgacacacatgg

SEQ ID NO: 891 - DNA, 124 bp, Homo sapiens
  misc_feature 93, 105, 109, 115, 121: n = A,T,C or G
cctgaggtctcagaacagcgatgagaggcagggtgtgtgcattggcctaagtgagatcatgaagtccaccagccgggatgccgtgctgtattnctctgaatcccncatncccacntccatngaa

SEQ ID NO: 892 - DNA, 87 bp, Homo sapiens
  misc_feature 33, 50, 66, 82: n = A,T,C or G
cctcattggtcggggccaaaagcgtgtactggncgttaccttcaagcatngtgttgagccctgatncagccacagcagcccnaaggg

SEQ ID NO: 893 - DNA, 420 bp, Homo sapiens
  misc_feature 229, 275, 298, 314, 317, 318, 324, 328, 346, 348, 355, 361,368, 373, 383, 388, 398, 404, 405: n = A,T,C or G
ccatgtccagccaagggtacaacgtgcttgttcccgatcacccaggtttgccattggaagtcaaagacagaatcgcttcatggcactacagatgtggaaaaataaaaatctcagctagaaagaacgtccgatttggagatagcgggaggacacgaaggagtgggggccattttggtgctgagaggagggtgccccaacttcaggaggaccatgtgacggctgtggttgntttcggggtcacttgcagcacacacagcgtcccttgatgctcgatngggaccccaaacgggccttgganacctaacccccccccnccnnaagggngttnagggttttttcttttaangnttaaaanggaatnctttttntgggntttccttggntaacngttaaaaaanaaaaannggggggaaaaggttt

SEQ ID NO: 894 - DNA, 314 bp, Homo sapiens
  misc_feature 228, 244, 280, 285, 290: n = A,T,C or G
cgaggtaaatggtcagcagtccaaatgcattgaaaaatagcatttggtttacacagaactgttggaacagatctactgtgtaaagcaaaatgaaccaattcttgaaaagtgttccagggccacaggttcttagattgggaagcaagatgacagttctgactagcttagttttccagactgaaagtaatggaattaaaataatgataactgtagaccttcttccctaangatggtggcctggggntttggggaaacccaggatggagggagaatactgctnacttnttcancttaggggctaccaaactcactgc

SEQ ID NO: 895 - DNA, 353 bp, Homo sapiens
  misc_feature 314, 318, 323, 329, 341: n = A,T,C or G
taaaacttgatccctattattctaacaaattgcagcatgaccataagcaaaaccagctcggtcaaactgacagcatcagattgtgaccttatctgaacagtgtagttcacttttattttggctctgaagagaggaagaaaaactttttagaggaacttaatggtaacataaaccaaatctccactgtattagtatttgagacaagattacatctatgcattcacacagcttgtctgtagatctgagagctccaagggagtggcccagcccccattcctctgactttagccttctgaaaagaacaagtcaaaccntggnatatnaaaaanatacccggaccnaaaggggggttt

SEQ ID NO: 896 - DNA, 435 bp, Homo sapiens
  misc_feature 18, 158, 159, 160, 170, 176, 187, 190, 276, 286, 291, 296,297, 310, 314, 319, 336, 340, 345, 351, 360, 362, 368, 371,375, 380, 390, 393, 400, 409, 428: n = A,T,C or G
ccacgaaatacgagaggnaatccagcatccagcagatgagaagttgcaagagaaggcatggggtgcagttgttccactagtaggcaaattaaacaaattttacgaattttctcagaggttagaagcaccattaagaggtcttctgggagccttaacannnccccatattnccccanccagcatttanagngagagcaggctcttgctaaacagtttgcagaaattcttcatttccactccggtttgatgaactcaagatgacaaatcctgcatacngaatgatttnggctnttttnnaagaaaattgagntcgnttggngggtttacaattccccnccgnagggnaaaatngggggtaantnttaatnggnaaancaatngttttttttnttnttggggnacttccaangttgaaaaccttgagtggngccccac

SEQ ID NO: 897 - DNA, 331 bp, Homo sapiens
  misc_feature 282, 298, 307, 309, 314, 320, 326: n = A,T,C or G
tcctggtgaccttgaagcatgtgtatgagattgcccgcatcaaagctcaggatgaggcatttgccctgcaggatgtacccctgtcgtctgttgtccgctccatcatcgggtctgcccgttctctgggcattcgcgtggtgaaggacctcagttcagaagagcttgcagctttccagaaggaacgagccatcttcctggctgctcagaaggaggcagatttggctgcccaagaagaagctgccaagaagtgacccttgccccaccaactcccagatttcaaangaggtagttgcaaaanctgtgcccnangggangaaggngggccncccaa

SEQ ID NO: 898 - DNA, 690 bp, Homo sapiens
  misc_feature 41, 79, 418, 423, 424, 433, 450, 458, 461, 489, 512, 520,522, 532, 564, 568, 594, 604, 624, 630, 633, 637, 646, 648,654, 661, 663, 676, 684, 685: n = A,T,C or G
gatcctctagagtcgacctgcagcatgcatgctcgagcggnctatagtgtgatgtgatatctgcagaattcgcccttancggccgcccgggcaggtccttatttctcttgtcctttcgtacagggaggaatttgaagtagatagaaaccgacctggattactccggtctgaactcagatcacgtaggactttaatcgttgaacaaacgaacctttaatagcccctccccctccggatgtcctgatccaacatcgaggtcgtaaaccctattgttgatatggactctagaataggattgcgctgttatccctagggtaacttgttccgttggtcaagttattggatcaattgagtatagtagttcgctttgactggtgaagtcttagcatgtactgctcggaaggtggggtctggtccnaaggnngccccaacncaaattttaattccggnttgggaanttnggacctgggggttgttaggactgttggntaataaattaaactccataggtntctgctgntnggtatgcccncttttcgggcaggcaatttactgttaaagtanaaanagtgacctctgaaccttatcagcccnattaggacanggatatgttcctcccccgcncgcccncgncgtnacttttatngngggggnttttacngngagtagagggagnttggtaannggggt

SEQ ID NO: 899 - DNA, 432 bp, Homo sapiens
  misc_feature 304, 332, 341, 353, 368, 374, 394, 397, 405, 410, 417: n = A,T,C or G
ccttgcctgtgaagctcattgggatgaattgcaccctaatgaagcaatacattgagtttgtggcagacagacttatgctggaactgggttttagcaaggttttcagagtagagaacccatttgactttatggagaatatttcactggaaggaaagactaacttctttgagaagagagtaggcgagtatcagaggatgggagtgatgtcaagtccaacagagaattcttttaccttggatgctgacttctaaatgaactgaagatgtgcccttacttggctgattttttttttccatctcataanaaaaatcaagtgaaagggtcccaccttnccccccccngaaatggcccgnaggtttttaacaaantttttncttccggggggccctcaaanggngaattccnccccngggggcngtcctaggggaccga

SEQ ID NO: 900 - DNA, 378 bp, Homo sapiens
  misc_feature 307, 308, 310, 321, 330, 333, 341, 370, 371, 372, 373, 374,375, 376, 377, 378: n = A,T,C or G
cctcgggcacacagccggcgcccagtcacccggcccagatggagggcggccgggccctgcacaggcacttgccaaggtggctcacactcacgcacactcgtactgagactcaaggccgtctccacaactccaaccagtgcaaatgacttagtgcaaattaaattcagaagggacgggggaaacagagtcgtggaggctttgaatctctcagaaaaaaggaaagacaggaaagctcagaaacaaagagacagaaggatgaaaaagaagaagaaggaggtggtggggaccgcgttattcccttgaaganntnaacttttggantaaatgggnggnttgggggnaaccctccccccaggggggtggaccttcnnnnnnnnn

SEQ ID NO: 901 - DNA, 438 bp, Homo sapiens
  misc_feature 17, 98, 106, 235, 289, 300, 303, 321, 357, 360, 391, 394,395, 407, 408, 409, 421, 429, 432, 437: n = A,T,C or G
aaataaacatatcatcngccccaacccacacgtgaggcaagcagcctgcatctggctcctttcccttgtcaggaagctaagtacccacaaagaagtgnccccctcntcttaaagaaattcaaagtgcatttgtttcagttctatcagaaaatgatgaacttagccaagatgttgcatcaaagggccttgggttggtttatgaactaggcaatgaacaagatcaacaggaattggnttctacacttgtggaaacacttatgactgggaaaagagttaaacatgaagtttntggagagacantgnggatttctaaggggaggnttttggtaaaaacgtgaaaggttagggggttttttnttnagggaactttggtttttggtaagggatttanccnnccaaattggggnnnaatttatgagtngcccaccntcntgcang

SEQ ID NO: 902 - DNA, 327 bp, Homo sapiens
  misc_feature 37, 71, 302, 318: n = A,T,C or G
ccagctggggggcttcctccagaccaccggcctcggncccggcatccctgttgggcgtcagcctgagagtncctactgtgcgtcagaatccaccttgcgtgctgtgcgtatctgtgaacctggagcggttacttattttgacagatatcactttgggtctctttacattaaatttcttttctctaaggaatataagacataccccatagctctgtgtgagccagcaataccgctgccccctggcgacagggcagaccaatgatgccaggcagctgtcacacgctagtatttggcttcattgngatctgaccctgcacnctggggctt

SEQ ID NO: 903 - DNA, 262 bp, Homo sapiens
  misc_feature 216, 231, 233, 246, 247: n = A,T,C or G
cgaggtaaatgtcaaagtattgctgcagctaggagaaccgcacatggaaacttgaggaaatttctcttattgctaggactataggacaatgggattcaagatgaatttccacaatgggataaccacgaaccgacctagagaatcacggaagtctcttatcaaagcagatatgtgtcaatgctgctcaaacacacacattcttttctggttgccccnattgtaaattatttnangagctgggggacnngcacacgtttatcta

SEQ ID NO: 904 - DNA, 482 bp, Homo sapiens
  misc_feature 267, 270, 306, 312, 314, 332, 340, 341, 359, 378, 391, 392,394, 409, 410, 424, 441, 443, 448: n = A,T,C or G
cctcgggcacacagccggcgcccagtcacccggcccagatggagggcggccgggccctgcacaggcacttgccaaggtggctcacactcacgcacactcgtactgagactcaaggccgtctccacaactccaaccagtgcaaatgacttagtgcaaataaaattcagaagggacgggggaaacaaagtcgtggaggctttgaatctctcagaaaaaaggaaagacaggaaagctcagaaacaaagagacagaaggatgaaaaagaanaanaaggaagtggtggggaccgcgtcatcccttgaagancttaantnttggattaattggtgggnttgggggnnaaccctccccccaggggnggactgcccggcggccttnaaggggaattcanncncttgcggcgttattnnggatccaactcgtncaacttgggtatattgnantagtntccccccccccccccccccccccccccccccccc

SEQ ID NO: 905 - DNA, 224 bp, Homo sapiens
  misc_feature 18: n = A,T,C or G
ccaattgaaacaaacagntctgagaccgttcttccaccactgattaagagtggggtggcaggtattggggataatattcatttagccttctgagctttctgggcagacttggtgaccttgccagctccagcagccttcttgtccactgctttgatgacacccaccgcaactgtctgtctcatatcacgaacagcaaagcgacccaaaggtggatagtctgagaa

SEQ ID NO: 906 - DNA, 326 bp, Homo sapiens
  misc_feature 212, 300, 309, 320: n = A,T,C or G
cctttgagcgggccatcgcgggcgacgagcacaagcgctccgtggtggactcgctggacatcgagagcatgaccattgaggatgagtacagcggacccaagcttgaagacggcaaagtgacaatcagtttcatgaaggagctcatgcagtggtacaaggaccagaagaaactgcaccggaaatgtgcctaccagattctggtacaggtcaangaggtcctctccaagctgagcacgctcgtggaaaccacactcaaagagacagagaagattacagtatgtggggacacccatggacctngggcgcganacccttaaggngaaatc

SEQ ID NO: 907 - DNA, 369 bp, Homo sapiens
  misc_feature 326, 330, 333, 344, 348, 349, 360: n = A,T,C or G
ccactacaggtgaggaaatgaatttctaagttaattcaaattcaaatgccacatttggctcgtggctcctgtactggacaacacagctgtaggccctgacctggtccagggcactttggttcaaaagccaactctgaggagagcaagtggcagaaacagcccttgggctcccctccccagagagaaacggcagctgcagctgctggaaagggcaagaatcagagtggggggacacctcgggcgcgccggataaggttggacctgcccgggcgggcgctccaaagggcgaattccaacacactggcgggcggtctaatggaatccanctcnggnccaacttgggngaannatgggcatacntgtttcctg

SEQ ID NO: 908 - DNA, 211 bp, Homo sapiens
ccacagcttgtggggatgacgcgatccgcgtgtttcaggaggatcccaactcggatccacagcagcccaccttctccctgacagcccacttgcatcaggcccattcccaggatgtcaactgtgtggcctggaaccccaaggagccagggctactggcctcctgcagtgatgatggggaggtggccttctggaagtatcagcggcctgaagg

SEQ ID NO: 909 - DNA, 331 bp, Homo sapiens
  misc_feature 306, 315, 322: n = A,T,C or G
aaaaaaaatacgcacattgtccaatccagtgattttaatcatacagtttgactgggcaaactttacagctgatagtgaatattttgctttatacaggaattgacactgatttggatttgtgcactctaatttttaacttattgatgctctattgtgcagtagcatttcatttaagataaggctcatatagtattacccaactagttggtaatgtgattatgtggtaccttggctttaggttttcattcgcacggaacaccttttggcatgcttaacttcctggtaacaccttcacctgcattgggntctttttcntttttcnttcctttgt

SEQ ID NO: 910 - DNA, 325 bp, Homo sapiens
  misc_feature 290, 307: n = A,T,C or G
aaacaaacaaaaagaaggtgcgttactatttttttttcacccgggaaagaggtgagaggatgggaaggagcagccaggcgtgggaagcggcgagatcctcgggctgggggtgcccacgtttgctacctcccactgtgaaatcgctggtgctcacaattgtctctcacagtgtatgtgatttttttaaggaaaaaaaaatccctatttaagattctgaaggtgctaccattattttgccacagactttgaagaaacttttggatgtggggcatcatccgcatctttctctntcctccaaatgacaaangttggggaattttttaat

SEQ ID NO: 911 - DNA, 313 bp, Homo sapiens
  misc_feature 189, 200, 203, 217, 220, 225, 228, 251, 254, 260, 276, 277,286, 288, 298, 305, 306: n = A,T,C or G
aaaaaatgattctttaatgtatttttctaaacattctgattggaagtagtggattcctaaatgattccaaagtcatctgtaattcttctgtttttgttttgttctgtcttttcttcattttggctttgggtggggggaggggcaggtgacacaaaggattttttttttttttttttaatttttggaatnttttccaatanccncctaaaaatttgcnctnaaatncancttggatgccttttgcatttttnccncggccncaacccccctaagggnnaattccacncnctgggggccntttctannggatccc

SEQ ID NO: 912 - DNA, 360 bp, Homo sapiens
  misc_feature 301, 307, 320, 321, 323, 341, 342, 347: n = A,T,C or G
ccagttgctctaagtggattggatatggttggagtggcacagactggatctgggaaaacattgtcttatttgcttcctgccattgtccacatcaatcatcagccattcctagagagaggcgatgggcctatttgtttggtgctggcaccaactcgggaactggcccaacaggtgcagcaagtagctgctgaatattgtagagcatgtcgcttgaagtctacttgtatctacggtggtgctcctaagggaccacaaatacgtgatttggagagaggtgtggaaatctgtattgcaacacctngaaacngattgaccttttnnantgtggggaaaaaccattnngaaanaaaaacctccctt

SEQ ID NO: 913 - DNA, 415 bp, Homo sapiens
  misc_feature 315, 318, 332, 333, 341, 342, 347, 357, 358, 361, 372, 377,383, 388, 389, 398, 402, 409: n = A,T,C or G
tcctgctagaatcactgccgctgtgctttcgtggaaatgacagttccttgttttttttgtttctgtttttgttttacattagtcattggaccacagccattcaggaactaccccctgccccacaaagaaatgaacagttgtagggagacccagcagcacctttcctccacacaccttcattttgaagttcgggtttttgtgttaagttaatctgtacattctgtttgccattgttacttgtactatacatctgtatatagtgtacggcaaaagagtattaatccactatctctagtgcttgactttacctccggncgngaccaccttaaggnnaatttccnncactngggggcgttnntanggaacccaacntgggncccaanttggnnaaaaatggnatanttggttnctgggg

SEQ ID NO: 914 - DNA, 314 bp, Homo sapiens
  misc_feature 256, 279, 291, 305: n = A,T,C or G
tgcttccagctcctccctggagaagagctacgagctgcctgacggccaggtcatcaccattggcaatgagcggttccgctgccctgaggcactcttccagccttccttcctgggcatggagtcctgtggcatccacgaaactaccttcaactccatcatgaagtgtgacgtggacatccgcaaagacctgtacgccaacacagtgctgtctggcggcaccaccatgtaccctggcattgccgacaggatgcagaangagatcactgccctggcacccancacaatgaagancaagatcattggtnctctgaacc

SEQ ID NO: 915 - DNA, 403 bp, Homo sapiens
  misc_feature 308, 330, 334, 356, 359, 368, 369, 379, 383, 387, 389: n = A,T,C or G
cctgacccgttgcactgaacaagaccaaatcgctggttgtgcgcttaacgtgagggtgggtccagtgtgccctgcgatgggtcccgtgtcactgtttacatgacctatttgtgtggttatatagccctttatttaaaagagagaagttccttttacaaagttattaaattaattatatgtttaaaagttaaagaaaaaagagctgcagagtatttataaaactgtcttttagaaaaaaacaagcaagaagaccatttgaccatatgaatggaaaagggaagaaagtattatagaaactttgctagttnaaaaaaaaaaaaaaaaaacttngccngaacccccttagggggaattcncanctggggggnngtttaggganccancttngnccaaattggggaaa

SEQ ID NO: 916 - DNA, 83 bp, Homo sapiens
  misc_feature 52, 64, 68: n = A,T,C or G
ccatgaagcagtcgcacagccaccaagtctcgttctcctgtctgggaggatnaaagtctgggcnccangcccccctagtgccc

SEQ ID NO: 917 - DNA, 347 bp, Homo sapiens
  misc_feature 307, 309, 312, 327, 338: n = A,T,C or G
ccatccgcttcctgaatgctgagaatgcacagaaattcaaaacaaagtttgaagaatgcaggaaagagatcgaagagagagaaaagaaagcaggatcaggcaaaaatgatcatgccgaaaaagtggcggaaaagctagaagctctctcggtgaaggaggagaccaaggaggatgctgaggagaagcaataaatcgtcttattttattttcttttcctctctttcctttcctttttttacctcggccgcgaccacgctaagggcgaattccagcacactggcggccggtactagtggattccagctcngnccnaacttggggggaatnttggcttagtngtccctggg

SEQ ID NO: 918 - DNA, 339 bp, Homo sapiens
  misc_feature 8, 12, 24, 228, 279, 280, 292, 301, 312, 321, 327, 331: n = A,T,C or G
aaaagaangaantaaaaacctganaagtctaacgtgaagctaggactcctgcctgcttcccttcaggcacctgctgtgcctccttctccgcagatgctctggttggaagcctcctgcactgccttctgtaacagcaccagctggacgttgtcatgaaatgtcacgagttctgggtgtttcctggtctgcaagtccgcagctccctgccatcggccacccgatctcacnatggcacagcagacaaactctgaggagcctcccaggagcctaaggcttttnnttccgcctcttntttatagcncacttgacaancaagccccntggatnttantggggaaa

SEQ ID NO: 919 - DNA, 102 bp, Homo sapiens; identical to SEQ ID NO: 691

SEQ ID NO: 920 - DNA, 504 bp, Homo sapiens
  misc_feature 293, 316, 322, 325, 329, 332, 335, 341, 342, 345, 360, 362,364, 377, 401, 408, 421, 422, 443, 446, 450: n = A,T,C or G
cgaggtaaatatggagttctttcagtggagagtaaaggtgctcctcctctgtgtctggtttacacggctccgcgagaccaaagggcccctcggtctccttgagcagcctggcactctgcacagaggatccaggaacggtgtcatggagccacattctgcacagacttgatgatgtggagggagctgcctggatcacttcagcgcatcagttgtgatgggagagccaaggcacttgagggcgggattgcgtctggccacctgttgccttccacctgaagggaagatttcccaantgctcacagtgaggataggactnggaaanccnttgnttnaanaagggnnggntttgtttctgccccngnanatcttatgggccngggcaacttttatcttgggacttnttttttnttaataacataanntgcccatgtgtgaggagaggnttnttanttgattttaactatttcatagaatagtgtctctaagtttgagctccgggcgtca

SEQ ID NO: 921 - DNA, 447 bp, Homo sapiens
  misc_feature 340, 343, 363, 377, 400, 410, 417, 425, 430, 442: n = A,T,C or G
cgaggtccagagttttttatttttatcaccaccatagatgttacagttggctgtggtcacaaaagtagttaattgtgtcagcacccaaataaacatctaacaggtttctcaacagaggaatccacagtccaattccacttcaattgatagacccaaaaaatataatttaatcaaagttctagagtttttgtttgtttgtttgagatggagtcttgctctgtcgcccaggctggaatgcagtggtgacatcttggctcactgcaacctccacctcccagggtcaagtgattcttctgcctcaacctcctgagtagcttggactacaaggggctggcccccnccnagttatttttggatttttantaaaaaggggttanccatttggacttcccggggggcnttcaaagggngaatccncacctggngggcngtactatggganccgac

SEQ ID NO: 922 - DNA, 375 bp, Homo sapiens
  misc_feature 266, 280, 286, 310, 316, 321, 323, 334, 342, 353, 355, 367,372: n = A,T,C or G
cgaggtccacggctgcttccagctcctccctggagaagagctacgagctgcctgacggccaggtcatcaccattggcaatgagcggttccgctgccctgaggcactcttccagccttccttcctgggcatggagtcctgtggcatccacgaaactaccttcaactccatcatgaagtgtgacgtggacatccgcaaagacctgtacgccaacacagtgctgtctggcggcaccaccatgtaccctggcattgccgacaggatgcanaaggagatcactgncctggnacccagcacaatgaagatcaagancattgnttctncngaacgcaagantcccgggnggatcgggggncnatcctggcttgntgccncct

SEQ ID NO: 923 - DNA, 479 bp, Homo sapiens
  misc_feature 333, 335, 341, 372, 375, 395, 397, 412, 427, 428, 471: n = A,T,C or G
aaaatgtgaggcaataagaattactttgtgttggatctgaggaggctttggtaaaacagtttcatctaaatgaaagtggtaatcctcttctaaaatagcaataactgaaaatgaaagtgttaattttaccttgtttgagttatcagggaacttagtaagtaatatcaaagcattttataaatgatatcaaagaagagtcaacattgatccagtcattttattttgtaatattgagggataattggttattaaactgaatagttcaggagactttacaaacctttgtttcaactttcttatcttgaaataatatcatttttaaaggcacctttntngttttncctttttttgtgggggaatacccaaaaaatnttngaaatcttttgtgaggtatntnttgtttactcgccgnacccctaggcaatcnnacctgcggcgtctatgatcactcgaccactgcgaatatggctntttttcgg

SEQ ID NO: 924 - DNA, 576 bp, Homo sapiens
  misc_feature 291, 297, 305, 309, 321, 326, 353, 371, 405, 430, 432, 433,448, 451, 454, 480, 494, 507, 513, 519, 526, 543, 560: n = A,T,C or G
ccagactcctggagatcgacccgtacttgaagccctacgccgtggacttccagcgcaggtataagcagtttagccaaattttgaagaacattggagaaaatgaaggtggtattgataagttttccagaggctatgaatcatttggcgtccacagatgtgctgatggtggtttatactgcaaagaatgggccccgggagcagaaggagtttttcttactggagattttaatggttggaatccattttcgtacccatacaaaaaactggattatggaaaatgggagctgtatntccccnaacaaatnaatntttcttgtgctnatggntccaaattaaaggggttttctttaaanggggaaaatttggttggnttcccctggcaaagttgggtcggaagggatatgnaatatatgatcctggatcaacctantnnttaacttccgacaanacncgngttaaaatttattattggattctccngaagaaagagtttntaactttctcatnctccanataagnctggcgnccctagcatcaccctgngctatatgaccactcgncactgggaaatggatg

SEQ ID NO: 925 - DNA, 321 bp, Homo sapiens
  misc_feature 316: n = A,T,C or G
cgaggtccagcatggtgggatttatgtgcatgaaaagggacaaggagtaatagaagagaatgaagtttatagtaacactctagctggagtctgggtgacaactggcagcactccagtactgagaagaaaccggatacacagtggcaagcaggttggtgtttatttttatgacaatggacatggagtgctagaagacaatgatatctataatcatatgtattcaggggttcagataaggactggaagcaaccccaaaattagacgcaacaaaatctggggaggacagaatggtggaattctaatttataattctggnctaag

SEQ ID NO: 926 - DNA, 348 bp, Homo sapiens
  misc_feature 276, 302, 317, 320, 329, 334, 338: n = A,T,C or G
ccattcagacccggggtggcccagaaaagcatgaagtaactggctgggtgctggtatctcctctaagtaaggaagatgctggagaatatgagtgccatgcatccaattcccaaggacaggcttcagcatcagcaaaaattacagtggttgatgccttacatgaaataccagtgaaaaaaggtgaaggtgccgagctataaacctccagaatattattagtctgcatggttaaaagtagtcatggataactacattacctgttcttgcctaataagnttcttttaatccaatccactaacacnttaattttttcactnggnttcccccgnggaantccnaattaagatc

SEQ ID NO: 927 - DNA, 319 bp, Homo sapiens
  misc_feature 11, 16, 263, 284, 310: n = A,T,C or G
cctccgttcanacccngatttggtggcccagaacattgacgttgtcctgaatcgcagaagctgtatggcagctaccctgaggatcattgaagagaacatccctgagctattgtccttgaacttgagcaacaacaggctgtacaggctggatgacatgtctagcattgttcagaaggcacccaacctgaagatcctaaacctttctggaaatgaattgaagtctgagcgggaattggacaagataaaggggctgaagctagaanactctggctcgatggaaactncctgtgtgacacctttcgagaacagnccctcatta

SEQ ID NO: 928 - DNA, 335 bp, Homo sapiens
  misc_feature 302, 309, 315: n = A,T,C or G
cgaggtcctcgaaataagatgaaaaagtctcctgtgggtagctggtgttcctttttcaacttggggaaatcatcatctgtttctaaacgaaagctgcagcggaatgagagtgagccttcagagatgaaagccatggctctgaaaggtggcagggcagaaggaaccctccgttcagttaaaagtgaggagtctcttacatctctccatgcagttgatggtgattctaagctcttcgacccagaagacccagatcttcagtgatgcactgtctgcctcttttaatggaaaaatgcttggggaanccctggnactccntttataatcgcctcttacca

SEQ ID NO: 929 - DNA, 411 bp, Homo sapiens
  misc_feature 273, 281, 334, 352, 365, 366, 378, 383, 396: n = A,T,C or G
cgaggtaaatgtacttgctcagctcaactgcatttcagttgtattatagtccagttcttatcaacattaaaacctatagcaatcatttcaaatctattctgcaaattgtataagaataaagttagaattaacaattttattttgtacaacagtggaattttctgtcatggataatgtgcttgagtccctataatctatagacatgtgatagcaaaagaaacaaacaaaagccaggaaaacactcattttcgccttgaatatggagatgggatnaattttgncctgtgccttatgtggaaaaggacctctttgggttccttttttggtctggggnggaaaattgtgcccgggnaacttttttcccnnctttaccccttnaaaangtgggggggttgnctgggctgaaatttc

SEQ ID NO: 930 - DNA, 349 bp, Homo sapiens
  misc_feature 267, 273, 276, 278, 294, 312, 325, 340, 345: n = A,T,C or G
cgaggtccaggggcgtccacgtggcagacggcagagtgctgggtgatctcctgcatgtcctcgtagttgaagagggggttgtagcaggttttgtggttcatgccgatgtcatggtaggtgaggatgacaggccggtttcccttgggagtcccacacagcgtgacgtgaacagagccatgtaaagtctcgatgtcctgctcctggacatcaaactcttgcaggaggccggtgatggtctcccctttctccaccaaagcttcacctcancgaggnctncntcctgcatcttccganacatgttcctgctttcanctcctttccccangggaaaaaaaaaagnccgtntcca

SEQ ID NO: 931 - DNA, 220 bp, Homo sapiens
gcaacacctaccaagccatcctctccacggacgggagcaggtcctatgccctgtttctctaccagagcggtgggatgcagtgggacgtggcccagcgctcaggcaagccggtgctcatgggcttctctagtggagatggctatttcgaaaacagcccactgatgtcccagccagtgtgggagaggtatcgccctgatagattcctgaattccaactcagg

SEQ ID NO: 932 - DNA, 307 bp, Homo sapiens
  misc_feature 228, 252, 261, 280, 286, 292, 299: n = A,T,C or G
aaagtacttttaagaaaaaaagcagggccttggaagttttggttcttttttcctcccctgttgcaaattctcatggtttgggttgggtggtggagagcgcgtgtcatctgcgggtggcactgcccacggtgggcgggcgggcctctctactcgaaggtgaccacgtttagattctgagacgggaagtggagggtgaataggtcacggcggcctttttttttttagttnaacttttccttttttgctgctagncatcctcgncgggcttttgcttcttggnttcganatcggnaatcctnataatttt

SEQ ID NO: 933 - DNA, 465 bp, Homo sapiens
  misc_feature 313, 320, 329, 336, 344, 350, 354, 357, 364, 366, 368, 383,387, 393, 397, 412, 422, 429, 436, 446, 451, 460: n = A,T,C or G
ccttgcctgtgaagctcattgggatgaattgcactctaatgaagcaatacattgagtttgtggcagacagacttatgctggagctgggttttagcaaggttttcagagtagagaacccatttgactttatggagaatatttcactggaaggaaagactaacttctttgagaagagagtaggcgagtatcagaggatgggagtgatgtcaagtccaacagagaattcttttaccttggatgctgacttctaaatgaactgaagatatgcccttacttggctgattttttttttccatctcataagaaaaatcanctgaagnggtcccacnttccccncccttaantggccnaaantgnaattaananantttttccttggccgnaacnccctangggnattccaccccttggnggcgttctanggaaccnactcggnccaacttggngaaanatggcatanttgtt

SEQ ID NO: 934 - DNA, 261 bp, Homo sapiens
cggccgaggtaaactttcttacctatcaatcaatcattttcatataatctaatgtctaaggactccaaatattggtacggggtgagtatccctaatctaaaagtcagaaacaagaaatgttccaaaattcaaaacatttgagcgcagatatgacacataagggaaatgctcattgaagcatttccaatttctaatgaaagatttttggattagggatgctaaattggtaaatataatgcaaatattccaaaataataattt

SEQ ID NO: 935 - DNA, 196 bp, Homo sapiens
  misc_feature 36: n = A,T,C or G
ccttgaagggacctcagagcaaaggaagagacctgngtgtggtgaggcatcccagggcatggaagggaccggttgtgctgtgggaatccactggcccctccttggttaaaaaagcacaacacatcatacatatttaccagaccagaagcgctggccccaagtctccccaacctggtcgggggaacctcctggacct

SEQ ID NO: 936 - DNA, 384 bp, Homo sapiens
  misc_feature 287, 294, 311, 313, 331, 337, 341, 351, 353, 354, 361, 369,374: n = A,T,C or G
tccacagaagttgctgctgacgctctgggtgaagaatggaagggttatgtggtccgaatcagtggtgggaacggcaaacaaggtttccccatgaagcagggtgtcttgacccatggccgtgtccgcctgctactgagtaaggggcattcctgttacagaccaaggagaactggagaaagaaagagaaaatcagttcgtggttgcattgtggatgcaaatctgagcgttctcaacttggttattgtaaaaaaggagagaaggatattcctggactgactgatactacngtgcctnccgctgggcccccaaananctttcagaattcccaacntttatntttnttaaaaaaananntcccccnttttttgnagaanccttaattaa

SEQ ID NO: 937 - DNA, 390 bp, Homo sapiens
  misc_feature 307, 313, 321, 342, 347, 348, 352: n = A,T,C or G
aaatacaaaaggcattttatatgaattataaactgaagagcttaaagatagttacaaaatacaaaagttcaacctcttacaataagctaaacgcaatgtcatttttaaaaagaaggacttagggtgtcgttttcacatatgacaatgttgcatttatgatgcagtttcaagtaccaaaacgttgaattgatgatgcagttttcatatatcgagatgttcgctcgtgcagtactgttggttaaatgacaatttatgtggattttgcatgtaatacacagtgagacacagtaattttatctaaattacngggcangttaggtnaactatttatacctggccccnggggnngccntttaaatttaaaagaatttggtggaaacctttaaggga

SEQ ID NO: 938 - DNA, 300 bp, Homo sapiens
cctcagttagtgagtcaagctgtgatgtgtgtgtctgaacacaactggctcccttggtataccgggggctccctctccagatgggtgtgagtgcatggtcctactgtacacacaggtctcagtatctatatgtgtctcatttgttcccatgggtctctgtgtttggatacataagcatggatatccctgctcatacagcaggaactcaggatctgcatggtgtatgtccctgtctgtaaacatgggctccagcaagtggatatgtgcgggcctgcccgctcctgttcatccgcaagtctt

SEQ ID NO: 939 - DNA, 301 bp, Homo sapiens
  misc_feature 276: n = A,T,C or G
ccttcgaggctcatccagcagaaggcggccaggaaacagtagtgcagcagcccggccaccaggcggcagcgcagccccacctggccgccttcgttctcgatgccggccaggaagatggtggagcccacgaagaggcagatgcagaggtgcaggtgtatggtggtgcgcgagccctggatgggccgcaccagcaggaaagtgaggatgcacagcagcaggcagaagagtgacagcgccagtcccaccctggtgatcagggtcatgcttccaatcctncacgttataatgagccataaggatt

SEQ ID NO: 940 - DNA, 472 bp, Homo sapiens
  misc_feature 275, 292, 302, 314, 340, 341, 346, 356, 357, 371, 374, 382,391, 393, 408, 413, 446, 448, 462, 464: n = A,T,C or G
cgaggtaaattaggcaaagcagctttagcctcatagaatattatttctttggactcaagctgaaatacaagccttacattgccttatgctttatttctttctaatttttatatgtatatagatgagggttccttaatggttgtgagcattgtgtggaattttacacctggcctgcgtggcagcctcttccagttgaggtgttttatgtcacgcacactccatcccagtgtacaaaacctgcttctcttctcaaccgtggcagctcccgctggctnctatgccctgcctaaanggctcttgancctctgggaatnggaggggcccaaaaaaaggaaaaccnnctttnaacccctttnnttcccgggggggcnttnaaagggcnaattcccancnccttggggggcggtnctaangggatccaacctcggcccaaacttgggcgtaancntgggcataactggntnccctggga

SEQ ID NO: 941 - DNA, 314 bp, Homo sapiens
  misc_feature 31, 249, 288, 290, 292: n = A,T,C or G
cctcagtgaggaatctaccaccgtctacagnagcagcccaggctcaactgaaaccacagtgttccctcgcagcaccacaacctcagttcgtggtgaagagcttacaaccttccacagccggccagcctcaactcacacaacactgttcactgaggacagcaccacctcgggcctcactgaagaatctacagccttccccggcagcccagcctccacccaaacagggttacctgccacactcacaaccgnagacctcggtgaggaatcaactacctttcccagcagctnangnttaacttggacaaaacttttta

SEQ ID NO: 942 - DNA, 310 bp, Homo sapiens
  misc_feature 293: n = A,T,C or G
ccaagaagcagtggccttattgcatcccaaaccacgcctcttgaccaggctgcctcccttgtggcagcaacggcacagctaattctactcacagtgcttttaagtgaaaatggtcgagaaagaggcaccaggaagccgtcctggcgcctggcagtccgtgggacgggatggttctggctgtttgagattctcaaaggagcgagcatgtcgtggacacacacagactatttttagattttcttttgccttttgcaaccaggaacagcaaatgcaaaaactctttgaaagggtangaaggtgggaaagaaac

SEQ ID NO: 943 - DNA, 306 bp, Homo sapiens
tccaacatcatatacctcttgaagaagaaggagtcagccatcgccaacttgtctctgtagaagctccgggtgtagattcccttgcactgtatcatttcatgctttgatttacactcgaactcgggagggaacatcctgctgcatgacctatcagtatggtgctaatgtgtctgtggaccctcgctctctgtctccaggcaagttctctcgaatactttgagtgttgtgtaacagttagccactgctggtgtttatgtgaacattcctatcaatccaaattccctctggagttcatgttatgccctg

SEQ ID NO: 944 - DNA, 222 bp, Homo sapiens
ccagaggcacagaggatctcagcctcgctcctggacagccggtcctacgagacgctcgtggatttcgataaccacctggatgacattcggaatgactggacaaacccagagatcaataaagctgtcctacacttgtgctaggcaggcaccgctgtgactgggctccgggcctttccactacgttgaagaagaaaacctatttttacctcggcccgcgaccac

SEQ ID NO: 945 - DNA, 325 bp, Homo sapiens
  misc_feature 248, 260, 283, 291, 305, 310, 320: n = A,T,C or G
ccatgctcaccatgatgtggtaggaagacgggcggaagacagagaagctcgcggtcacgtggggcaggttcacctgcagctcgttgagcagtacactgccatcggacttgaagaccaccacattcttcttcttgtcagccagcagcaccaccgtcttcaggcaggtctgcttgtctgtggagccacagggggccagctcgcccaggagagcgtaggaatcgttgtggtcacccttggacctcggccgngaccacgctaanggcgaattcagcacactggcggncgtactantggatccgaactcngtccnaaacttggcnaatat

SEQ ID NO: 946 - DNA, 295 bp, Homo sapiens
atctctagcccaagctgaggccagatctctccactggagaataggagctgatttcctgctccttccaaccaaagaactgagaagccaggtagatccctgctctcagcctagccatgccggaacccgcgggactttagctaaagcagcttgtgtcactgaagctggacagaacaggcttcttgtaccctaaacaagctacccagactcttcagctccttaaggccgagcccttgtctcactccaggagggcactgggcttcttaatgctttcacccctccgaacacacaccgtttt

SEQ ID NO: 947 - DNA, 581 bp, Homo sapiens
  misc_feature 446, 477, 478, 486, 506, 514, 519, 529, 534, 535, 547, 568: n = A,T,C or G
aaattttatacatgtttattttcattataaatttatgtaaatcactttggacccagcatgtccttaggttttacccattcgtcaaactgctctgctgtgagatagccaagttcgatagcagtttcctttaaggttgatccatttttgtgtgctgtcttagcaatctttgctgccttgtcataccctatatgaggattgagagctgtcaccaacattagaagactcattcatcagcttgttgatcctttctgtattggcctggattcccaccacgcagtttttcttgtaaaggaaactgaagcatcccccagcagcctggctgagtgtaacacatttttaatcatcattggcttgaaaacattcaactcaaaatgtccattgctgcctccgacagtgacagcaacatggttccccatgacttgggctgcaaccatggcattgcttcncactgagtagggttcaccttgcctggcatgnnactgcttnctgggtcattttcaggcaanatcaattntccanacttgaccgnggccnnaccccaaaaacngaatatcattgctatcttctnaaatggcgggcag

SEQ ID NO: 948 - DNA, 546 bp, Homo sapiens
  misc_feature 408, 409, 444, 452, 454, 467, 495, 504, 511, 543: n = A,T,C or G
cctgactatgacttcagcacagcccgcagccatgagttcagccgggagcccagccttagctgggtggtgaatgcagtcaactgcagtctgttctcagctgtgcgggaggacttcaaggatctgaaaccacagctgtggaacgcggtggacgaagagatctgcctggctgaatgtgacatctacagctataacccagacttggactcagatcccttcggggaggatggtagcctctggtccttcaactacttcttctacaacaagcggctcaagcgaatcgtcttctttagctgccgttccatcagtggctccacctacacaccctcagaggcaggcaacgagctggacatggagctgggggaggaggaggtggaggaagaaagcaaaaagcgggggcaggtggggccnnagaaaccagccccatggaggaggacagggtcccantgatcttntntttgatgaaggangagccgaggccccagcttatccagtttnaccaatgcntggaccnccccccttgaagccccccccccccccccattnttg

SEQ ID NO: 949 - DNA, 341 bp, Homo sapiens
  misc_feature 266, 313: n = A,T,C or G
ccatgttgttgggcagctgtccacccatggataggatcacaccttcagggttctcgagctcatagatgtccatcaccacctcaaaagagatctcatcaaagtagagtcgatcacacatgtcatagtcggtgctgactgtctctgggttatagttcaccatgatggtcttatatcccatctttcggagctgctggatgcagcctacagcacaccagtcaaattcaacgctagaagccaatacggtagacgccagagccaaggactangacatgaggtgttcgaaaggtgaggtcatgggtggtgccccaatacnttaggtataggtaatttgtctgggctgg

SEQ ID NO: 950 - DNA, 344 bp, Homo sapiens; identical to SEQ ID NO: 381

SEQ ID NO: 951 - DNA, 370 bp, Homo sapiens
  misc_feature 154, 231, 256, 258, 260, 268, 274, 276, 283, 284, 297, 298,299, 326, 332, 344, 349, 352: n = A,T,C or G
aaatgtagctgaccaaaagcttcttgaagctagtacacagtttcagaaaaaacaaggaaagaatactattgatgtctggtggctttttgatgatggaggtttgaccttattgataccttaccttctgacgaccaagaaaaaatggaaagactgnaagatcagagtttcattggtggaaagataaacagaatagaccatgaccggagagcgatggctactttgcttagcaanttccggatagacttttctgatatcntngngctaggangatatncnataccanncccaaagaaagannntatttatagcttttgaggaaattattngatccntttcagaccttnatgangantgaatatagcagcaagat

SEQ ID NO: 952 - DNA, 654 bp, Homo sapiens
  misc_feature 387, 389, 471, 474, 486, 508, 509, 515, 542, 547, 550, 566,567, 570, 582, 589, 603, 606, 610, 624, 630, 642, 644: n = A,T,C or G
ccatctcccagaaagtttaacaaaacccgaccaggttgcccccttcaccttcttacaacctcttcccctttccccaggggtcctgtcctccactccagatcattcctttagtttagagctgggcagtgaagtggatatcactgaaggagataggaagccagactacactgcttacgttgccatgatccctcagtgcataaaggaggaagacaccccttcagataatgatagtggcatctgtatgagcccagagtcctatctggggtctcctcagcacagcccctctaccaggggctctccaaataggagcctcccatctccaggtgttctctgtgggtctgcccgttccaaaccttacgatcctcctggagagaagatggtagcaancnaaagtaaagggtgagaaactggataagaagctgaaaaaaatggggcaaaacaagacagcagccactaggtaccgccaataanaanaaggcggaccangaggctcttactggtgagtgcnnaaactngaaaataagaacgaggctttaaaaganagggnggnttcctgacctcggccnnganccccttaggggnaatccancacatttgcggccnttntagnggatccaagctcgnccccancttgcgtatttngnaatacctgtt

SEQ ID NO: 953 - DNA, 612 bp, Homo sapiens
  misc_feature 419, 458, 459, 467, 474, 482, 519, 521, 525, 549, 560, 581,610: n = A,T,C or G
aaatgtgtttttcctgagagacaaggaagacttgggtatttcccaaaacaggtaaaaatcttaaatgtgcaccaagagcaaaggatcaacttttagtcatgatgttctgtaaagacaacaaatccctttttttttctcaattgacttaactgcatgatttctgttttatctacctctaaagcaaatctgcagtgttccaaagactttggtatggattaagcgctgtccagtaacaaaatgaaatctcaaaacagagctcagctgcaaaaaagcatattttctgtgtttctggactgcactgttgtccttgccctcacatagacactcagacaccctcacaaacacagtagtctatagttaggattaaaataggatctgaacattcaaaagaaagctttggaaaaaaagagctggctggnctaaaaacctaaatatatgatgaaagattgtaggactgnncttcccanccccatnttcatggnggggcaatgggtatttgggtattttactcaattggtncncttntttgaaatgagggagggacatacngaataggaacnggtgttttgctttccttaganccttttgcccccccctgaccccgaggaanca

SEQ ID NO: 954 - DNA, 720 bp, Homo sapiens
  misc_feature 408, 471, 526, 562, 576, 602, 615, 626, 637, 644, 659, 705,709, 711: n = A,T,C or G
ccagtgtaattgttccaacaaagggaacctactttggtgcccgaggaaatggctgtttgtgatgctggggaaaagtcaagatgctgacgcctaatggctgttctagcctttccaggtttgtaacatgaagatggggaaggaaatggcaccactgctgtttgtaatctgaggaactcttggcagcattcactctccaaagcagtacaaaacttacaaagaagtcaaaagtcttaacactcccattctccaggaactcttgtctgtgtcatctggtaggagggaggaatcctggttccttcaggtccttgtcatgttagctttttgatagcttcaatccactcggctcgctcagccttgctgctggcctgaatgtaatagtgtgtgtcatccttagtaatcactttgaanaggtttccctggacattccctttaaccccagtgggaacgccattatcttccagagcagacacngagtgaaccacgaaagagaaaacccacccactggcctgttctctttttttggaangggcatagtaatgcaaggaaaagctgggatcccttncttagaacaaaagngaccgcacccttccagtttttcctcnttgtgtcccctgntttggaactcnggcccgaccancccttangggcgaattccagcncaccttggcggcccgttctaatggatcccaactccggtaccaaacntggngnaatctgggc

SEQ ID NO: 955 - DNA, 283 bp, Homo sapiens
ccatgtggctgcccggttccccttcatccctatgccactggactacatcctgccggagctgctcaagaatgccatgagagccacaatggagagtcacctagacactccctacaatgtcccagatgtggtcatcaccatcgccaacaatgatgtcgatctgatcatcaggatctcagaccgtggtggaggaatcgctcacaaagatctggaccgggtcatggactaccacttcactactgctgaggccagcacacaggacccccggatcaagccccctctttgg

SEQ ID NO: 956 - DNA, 692 bp, Homo sapiens
  misc_feature 532, 534, 561, 566, 619, 621, 639, 643, 647, 651, 661, 688: n = A,T,C or G
ccatcttccacaagtactccggcagggagggtgacaagcacaccctgagcaagaaggagctgaaggagctgatccagaaggagctcaccattggctcggtgagtggcctcctccccaggaccccttttcccacccttgtcctttggaagcaggattaggggagagagaggtgccaggtgcatctgactcacatttacccacattctgaggccctggtccacatgtagaccctgagctgtagacccactctcccagcgggtaggggatgcttccagccggatatccatctctccaaatgaggaccagtaactgagaagtagctgaggagaagcaatgccaaagtgacatgggtccttggtgatgagggagcacagagccacttgcagagaggattgcctgggagggggaaggggaagaatccagggttgtcatcaccactgagtatggatttcacattctaacacattagaactgcaggatgctgaaattgcaaggcttgatgggaagaattggccggaacaaggaccaggangngaacttccaggaatttgtcaccttctnggggnccttggctttgatctccaatgaaaccctcaagggttgaaaataaatagggaananggagacaccttttggggncctntttnatcnaatccatggnggggaattgaacataaattttttgggnaaaa

SEQ ID NO: 957 - DNA, 327 bp, Homo sapiens; identical to SEQ ID NO: 350

SEQ ID NO: 958 - DNA, 220 bp, Homo sapiens; identical to SEQ ID NO: 5

SEQ ID NO: 959 - DNA, 462 bp, Homo sapiens
  misc_feature 397, 417, 422, 433: n = A,T,C or G
aaagttgctttgctggaagtttttataaggaatctcagattaaggctgacttcagactttgtttgtagtacctgtgggtttattacctatgggtttatatcctcaaatacgacattctagtcaaagtcttggtaatataaccaatgttttcaaatgtattctgtcgtacaaagagcagatttttattgaacttgtgcaataactatattaccatacaatataaatattcatgaatagtttcccaagtctggagcgaccacatagggagaaaatgtaaatgtctcaatttttgttcacaaaagtatattttatcaaattgctgtaagctgtggatagcttaaaagaaaaaaagtttcctgaaatctggggaaacaagacatttacctgcccgggcggntcgctcgaaagggcgaattnccacncactgggcggncgtactaggggatccgaacttcggtccaa

SEQ ID NO: 960 - DNA, 396 bp, Homo sapiens
cctccaccatggccttcaagcagatggagcagatctctcagttcctgcaagcagctgagcgctatggcattaacaccactgacatcttccaaactgtggacctctgggaaggaaagaacatggcctgtgtgcagcggacgctgatgaatctgggtgggctggcagtagcccgagatgatgggctcttctctggggatcccaactggttccctaagaaatccaaggagaatcctcggaacttctcggataaccagctgtaagagggcaagaacgtgatcgggttacagatgggcaccaaccgcggggcgtctcaggcaggcatgactggctacgggatgccacgccagatcctctgatcccaccccaggacctgcccgggcgggccgctccaaaggg

SEQ ID NO: 961 - DNA, 582 bp, Homo sapiens
  misc_feature 383, 492, 527, 534, 539, 546: n = A,T,C or G
aaaactacgactcagcatacattttcccacatacatttttacattgtaccttaggactcagtcatctccacttaaattgatgacacaagcagctaataaccatttctgggtttctgcctaaccccctaattgtctgttaaagccaattctctgggtgtcccagtgagtggtggctttttttctttccacattggcacattcacttctcccactcttggcatgtaagaaataagcatttacataattggaaaaatctggatttctgatgccaaagggttaaagcttcttggatttcatttcattgatatacagccactattttatttttgatcagtggcctttgggccactgttcagggtactgaccatcagtgtcagcattanggttttggtttttgtttcttttgggtctttcttttttggcacatgtgaatcttgttttgtgtaaaatgaaatactttctcttgttctctgatgatgggttacctgcccnggcggccctcgaaagggcgaattccacacacttgngggcgtnctaanggatccnactcgggaccaagctgggggaaatatggcataactg

SEQ ID NO: 962 - DNA, 114 bp, Homo sapiens
  misc_feature 21, 65, 67, 68, 97, 108: n = A,T,C or G
ccaggaggcagggctgggcangatgactggggctacatggggcttggcccttccctgtggctggnannccagatgctgcagtaacactcattcccangcttcactatntacctc

SEQ ID NO: 963 - DNA, 601 bp, Homo sapiens
  misc_feature 395, 452, 478, 489, 547, 561, 563, 564: n = A,T,C or G
aaaaagattgtttttgtcttttggtttcttcctttctcctggagaaatgatctaccagtcaaggcaatatgtagcagatccctgggaattaaaggtttgcccatttgttcactgtatttagtccctgctacattccaggcattgtactaagtatggggaaccacagagaagacattccctcagaaactgctgcagtgctttcgcttatccctacctaaaaaaccgtcaatgtgaaatcatttccttgattataactataatgataatggattagtttatataaacctatgtttagacaagttcaagacaagcgtgtctttctataaaaagtattgaaaatgaaggaaatgagatcatgtttcaatttattaaagcagggaagagcattctgtggntagttcgtgtctaggatttgagtgccttactgaatgcatttaccagcaaacatgtanccaatctgttctctcattgtgattgngggaagaagcncatgttaaatgatagtctttaatgaggaagtatggcgtggtacttattctgtaagttnagagtttgcttgangnnaatagaatatccttatgcctggaaaataaattcttga

SEQ ID NO: 964 - DNA, 560 bp, Homo sapiens; identical to SEQ ID NO: 49
  misc_feature 286, 395, 398, 463, 464, 484, 507, 509, 518, 521, 522, 528,533, 542, 547, 549, 553, 558: n = A,T,C or G

SEQ ID NO: 965 - DNA, 223 bp, Homo sapiens; identical to SEQ ID NO: 644

SEQ ID NO: 966 - DNA, 425 bp, Homo sapiens
aaaccaaattgagattaaattgaagaaaagcaagcaaattaatttcagcttgattatcaacctgtatcaagaacaaaaatgggaggaggtgtccacatttacggtgtgtataggtaacatggggaaaatgctattctgtgttttggaaaagaagaaatagtgccgtcctatttatttctatatttagaaatttttctcaaagaaatttcaattgtatctatgagatgggtttctaagtatcttattgtgtgttataagtgccttttaatatcatactaagtgtgagcttctggacattttcaagagcttacaaaaactaagtggcattgtatttttataaccccattgagaagactaagtaagaaatgaaatgtcctatcaattttattttgtcatgcttcaaacaataaagacatttctgcttt

SEQ ID NO: 967 - DNA, 339 bp, Homo sapiens
  misc_feature 293, 331, 335: n = A,T,C or G
cctgacccgttgcactgaacaagaccaaatcgctggttgtgcgcttaacgtgagggtgggtccagtgtgccctgcgatgggtcccgtgtcactgtttacatgacctatttgtgtggttatatagccctttatttaaaagagagaagttccttttacaaagttattaaattaattatatgtttaaaagttaaagaaaaaagagctgcagagtatttataaaactgtcttttagaaaaaaacaagcaagaagaccatttgaccatatgaatggaaaagggaagaaagtataatanaaactttgctagttaaaaaaaaaaaaaaaaaacttggntcgnaacc

SEQ ID NO: 968 - DNA, 291 bp, Homo sapiens
cctccctgtcgcctgggtgcccacggggctctgactttcccccgttaccagcctcgtggctgtccccggagatgctgagagtgacagcttgagagtttgattcttacataagcgggaagcagtgagaagtcacccgcccaccacgtccctccgttcctgttggcacccccccatcctaccatctgtggcccccgtgggccctgacttgctaaggcgctggcgggcatagccttgggagcactggggtacatacatggccttatagcacgaaggcccactccaaggttctgg

SEQ ID NO: 969 - DNA, 130 bp, Homo sapiens
cctctactgcagcggctgggtgaagagaggacctacaggtgtcatagccacaaccatgactgacagcttcctcaccggccagatgctgctgcaggacctgaaggctgggttgctcccctctggccccaga

SEQ ID NO: 970 - DNA, 210 bp, Homo sapiens
cctctgagacagcagacacaagcacccactccagtgtccccctcagtcatcccgggttccaagcacccacacaatgcccattggatggctacaaagggaaagccccatctgggtccatgacccatataccaggtgcagagccaggacagagggcagggggcagggggctgtgaaggcgatgcctagaggatccgacccctcccggcatgg

SEQ ID NO: 971 - DNA, 122 bp, Homo sapiens
aaaggcatctatctatcaaaggaaaatttgggtgttagattttcttgggaccgtttctgtaacctttgcccttcacaatatagaaaatattggttttgccattacattttaatgccaggttt

SEQ ID NO: 972 - DNA, 108 bp, Homo sapiens; identical to SEQ ID NO: 883

SEQ ID NO: 973 - DNA, 313 bp, Homo sapiens
  misc_feature 96, 141, 153, 160, 168, 176, 190, 194, 198, 229, 266, 271,294, 296, 306: n = A,T,C or G
ccaggatcctatgcgacaacgcggacaacatcacccgggtgcagagcgacgtgttcagggtggcggagttccctcacggctacggcagctgtgacnagatccccagggtggacctccgggtgtggcaggactgctgtgaanactgtatggacnacggggnagttcaantccttttnctatcattttcgangcanacangttctcttgacttcatctaccaggaggacanaccggaccaagaatacaataccactgaaaatacccantgttnggtagacagggggaacatctcancnacatcacctnaggcttc

SEQ ID NO: 974 - DNA, 272 bp, Homo sapiens
  misc_feature 124, 149, 206, 226: n = A,T,C or G
cctaacaaaatggcatacaacttaacagtagcagaccagtgttaaaaagtctggagtcaaggggaaaaggtaaaattggaatgtttccagaatctcacaaaaaaaaaacaacaaaccgatgttntaagtgcccaacatgaacaaattanaaccttaaataaaggtcagtgttaatgccaatactagcataggttcagcaccaagcncaatgttattttactggttngcctttttcattctgttttttttgttttgttttgttttgttttttt

SEQ ID NO: 975 - DNA, 375 bp, Homo sapiens
ccacaggaggacagaaagtgaaatgtcagccaggatcgctaaaatgtccttgagtcccagcagccccaggcacgaggatcagctcgaggtcaccagggaaccggccaggcggctcttcctttttggagaggagccatcaaaactcgatcaggatgttttggccgctcttgaatgtgcagacgtcgacccccatcagttcccggccgtgcacagatggaagagtgctgtcctgtgctactcaccctcggacagacagagttggcccagtcccgcggtgaaaggaaggttcaagtctcagctgccagatctcagtgcccctcacagctacagtccggggagaaacagcgtggctggaagcaaccccgcaaagccagg

SEQ ID NO: 976 - DNA, 340 bp, Homo sapiens
cctggagtccaataaccaccccctcataccacaccctgtgcatacaccagccaagcctttcctggtctgggaagggaagagaaaaaagacgcaggccacctgggggttctgcagtctttggtcagtccagctttctatcttagctgcctttggcttccgcagtgtaaaccttgcctgcccggaggcaggaggcccagctggacctccgagggccatgagcaggcagcagccatcttggcctcaagcttgcctttcccttgagtccctctctcccctcggctctagccagaggtgtagcctgcagatctaggaagagaagagctggggaggaggatgaagg

SEQ ID NO: 977 - DNA, 429 bp, Homo sapiens
ccagtggtcggagcggcagggttccacaaacttctccacgaggtccacaaacaggtctctgacatctttattgtgggtcagcttggcggccacgttcaccagcccccgggacaggttcttgaagttggcttccatctcagagaagacgcccagctttccccggagagcagtgcacaccaggctcttgtgcaggtccagaaggtccttgtcagccactagcaccttgagctccttcaagtcctggagaaattccttgtctaagtccatgtccatgtcatccatctgtgagtcgacggctccaagggtccagttttggatcatgagctcagcgcagaaggcaaagtcaccgaagctcagatactgcagttttttcttccctgtctcaaaagcggttgttagcaaagaagacgatggctgcatagtccctgg

SEQ ID NO: 978 - DNA, 390 bp, Homo sapiens
  misc_feature 124, 273, 306, 307, 334, 338, 365, 366, 373: n = A,T,C or G
aaaattttagaagttaagacttacgaccacctcagtatatgccattcctaatagaaggaggtatgacggtttcaaactcgtgcagagctgcattttcatttacaagtctctgtaggcactttanaagtgaagcttggcttcaaaatacaaacactgggggctttggctcaaccttttaatataaaaaaattcactgatgtacaaaaatttgaaagtgtgacaatgacaattatgaaatcctgtgactgaaagtcccctcgagtgcactctgtnggtgcacatgcgcccgcccacacaaactctggnntggaaacataaactaatgcaaaccagngctncccagaagcaccaacacgtgtgttctnnattccancaatcacagaccagttt

SEQ ID NO: 979 - DNA, 372 bp, Homo sapiens
  misc_feature 307: n = A,T,C or G
ccaggctgcccctgggcggggccatgtggcctcagaccacaagagcggagctgccctggcccaagcactgcagctgcctgcacccccgggcttcgcagccttgcttgttttctctgaacagcaacagaacagtgttcacagcgattcaaagggtggcattgggttggacgttctgggtacaagccaacctagcccacgttgtacgtgaatgtttaatgtgctctcaaaacatggaaaataagtttagtgcacatagctaaatcacaaaacatccaatttctctgtttcctcaggaagtcattactgngccaccacatcacatgaccttaacatgatcaatgtatttctctgccttgacatttacctcggccg

SEQ ID NO: 980 - DNA, 261 bp, Homo sapiens
aaattattattttggaatatttgcattatatttaccaatttagcatccctaatccaaaaatctttcattagaaattggaaatgcttcgatgagcatttcccttatgtgtcatatctgcgctcaaatgttttgaattttggaacatttcttgtttctgacttttagattagggatactcaccccgtaccaatatttggagtccttagacattagattatatgaaaatgattgattgataggtaagaaagtttacctcggccg

SEQ ID NO: 981 - DNA, 266 bp, Homo sapiens
  misc_feature 122, 134, 151, 232, 238, 256, 261: n = A,T,C or G
aaaagctatgttgttagcacacagaacacttcattgttgtttttgggggaaggggcatatgtcactaatagaatgtctccaaagctggattgatgtggagaaaacacctttcccttctagtnttgagagacttnctcttggctcccaggangagggattccctgactttgacacacatggacctgcccggcggccgctcgaaagggcgaattccagcacactggcggcccgntactanatggatccgagcttggtnccaantcttg

SEQ ID NO: 982 - DNA, 199 bp, Homo sapiens
  misc_feature 110, 167, 178, 190: n = A,T,C or G
ccactctgcccaggagctgccgaccatcaggacgcctgcagacatttacagagcctttgttgatgttgtgaatggagaatatgtccctcgcaaatccatcctgaagtctngaagtagagagaataggtgtgtgtagcgacactagtgaaagcagtgctgctgaattngatgataggcngggagttttganagagtatca

SEQ ID NO: 983 - DNA, 344 bp, Homo sapiens
  misc_feature 44, 147, 159, 191, 203, 247, 250, 264, 268, 270, 274, 280,289, 298, 301, 306, 309: n = A,T,C or G
cagagatggtttgtccatttgtccactgagaaattagaaactanggacaagggggaggaaaagtactgaaatacagtctatgaagcaagtgtgtctcgggctgtgcttgtcccaggagccccagcagcatcttgaactgagggcttnttcagtcctgcnggaacaggatcatctgtctcagcggtgggcanatgttttcatanacagccagggagtaaacacttgttggctctgtgggctgtatggnctntgccataaatagtncatnanatgnggctgntctagtacnaccttttanacncaganatntcaatgactatattgttctgcgccaagcaaactta

SEQ ID NO: 984 - DNA, 400 bp, Homo sapiens
  misc_feature 241, 243, 262, 264, 279, 294, 296, 299, 311, 320, 339, 343,348, 349, 360, 364, 383, 394, 395: n = A,T,C or G
ccactgcctactccacgctccagctggtcaccaacccctaccaggccaccattgatggagtcagatttttggggacatcaggacagaacgtgagtgacattttccgatacagcagcatggaggatcacttggagatcctggagtggaccctgcgggtccgtcacatcagcccccacagcccctgacactctaggttgttaccccttctacaaaaactgacccgttcatcttcccagagtgncngcatgtttacttttgtggnancacccccagctttgngttccaaaaatcatncnaantcctggaggatnatacaaganctgttgggtgacttgttcntgantttanntattcacgctngacntgccttggctttgtgaacnttgcgcaaagnntgggc

SEQ ID NO: 985 - DNA, 232 bp, Homo sapiens
  misc_feature 79, 133, 154, 156, 178, 189, 205, 220, 223: n = A,T,C or G
tgggtatgaggagggctggaaggcagagctttgggccaaaagcaggcgttggggggtcccccctcaagtttggagccgnttccgtggttgtagcataggaccggaggttgggttcctgattaaacttcactgngtgttttcaaaaaaaaaaaancntccccgggctggccttttaaangggcaattccnacccccttgggggccntacctaggggattcnaantttgagtcc

SEQ ID NO: 986 - DNA, 347 bp, Homo sapiens
  misc_feature 274, 332: n = A,T,C or G
cctggaatgtcactacccccaggcggttggggtccacaatgctcatgatgcgggcaaattctgcttctccctggaggtcgttgccaatatcataacccaagctgatgaggcaggctttgaactcctcgggacccagtgtgccggagtgatcccggtcaaagtggttgaaggaggcccggaactcattcatctgctcctggctgatgcccttggcatcccgggtcaggatctggttctctacctcattgatggtcctggcgatggtggtgagcanctgctcccagcccacacggatgtgctccatggtgtagttggtgtgcttgttgtcgaanatgagccctcctgga

SEQ ID NO: 987 - DNA, 439 bp, Homo sapiens
  misc_feature 208, 237, 240, 247, 255, 303, 314, 339, 352, 355, 370, 371,372, 382, 385, 391, 394, 398, 408, 413, 420: n = A,T,C or G
aaaacttgctttgtttagaattcccacctcatttttccatggacaaaagtattctttatgtcctagtgcacttacaatttggtattacctgggagtgaaaagaaatattacagccatgcctaactgacttcttgaggtaagattgttctgtcagaaaaccctctcccagttcccctgcagctcttcaggaatccacatctctgcaganctctttgttctcatgggtggcacctctanagngaagaanatcctttntcaagaagggaaacacgggaaatgagagggtcctgcatgcagagctgngaatcaacttncactctgcctcttgcaagctgtggngaccctgggcacnatntttccttcctctggnnnaccactggcntcntagatnttnagcntggtggccantccgnacccttntcaatttccctggaattat

SEQ ID NO: 988 - DNA, 256 bp, Homo sapiens
ccttcaagaaagcacttgcagggggtgtggaagcagaagtctcagcttctctttcatcctcggctgatcctgtatcactgtcctcatcttcctcctcctctgtgtcctctcctggctgatagacccaggacttcaagaagacacctgtagcaggagtggaagaggaagcctcagcttctccctcttcctcatctgatccagagtcactgtcctcatcttcttcctcatcttcctcttcctctgtgtcctctcctgg

SEQ ID NO: 989 - DNA, 380 bp, Homo sapiens
  misc_feature 124, 232, 246, 285, 308, 329, 346, 370: n = A,T,C or G
aaaaaagttccaacacacagccatgaggagcctcagttttgaaagaggtgcataataaaactactaaccagaggagtctatgccattttaagaaaaacaattaacctggttaaagagaaatgtnttatgtaaataataaactaattgtggcttgtaaatgattttgtatgtgatcctgtcgactaaaatcacttaacaattctacaataagcttctgcatcaaagcctgccncttgctctatgccngaataacaccaaatggaatctcctcatctcttgcttgtnagcgatgtgtctgattcaggggnatcttgtctttttgttacttnttttgtgccgtggtctntcattgggggtctttcaaccgcantttttcaaac

SEQ ID NO: 990 - DNA, 366 bp, Homo sapiens
  misc_feature 209, 260, 270, 324, 333, 352, 359: n = A,T,C or G
ccaataaggtgccagctgctgcccgtgctggtgccattgccccatgtgaagtcactgtgccagcccagaacactggtctcgggcccgagaagacctcctttttccaggctttaggtatcaccactaaaatctccaggggcaccattgaaatcctgagtgatgtgcaactgatcaagactggagacaaagtgggagccagcgaagccacnctgctgaacatgctcaacatctcccccttctcctttgggctggtcatccancaggtgttcnacaatggcagcatctacaaccctgaagtgcttgatatcacagaaggaaactctncatttctcntttcctggaaggtgtccgnaatgttnccagtgt

SEQ ID NO: 991 - DNA, 302 bp, Homo sapiens
  misc_feature 158, 185, 223, 230, 259, 268, 273, 283: n = A,T,C or G
ccaccagcaggaatgcagcggattcctctgtcccaagtgctcccagaaggcaggattctgaagaccactccagcgatatgttcaactatgaagaatactgcaccgccaacgcagtcactgggccttgccgtgcatccttcccacgctggtctttgacntggaagaggaactcctgcaataacttnatctatggaggctgccggggcaataagaacagctaccnctctgangaggacctgcccgggcggcccgctcaaanggcgaattncagcncactggcggnccgttactaagtgggatcc

SEQ ID NO: 992 - DNA, 569 bp, Homo sapiens
  misc_feature 335, 392, 393, 401, 415, 447, 483, 494, 495, 505, 518, 520,536, 557: n = A,T,C or G
aaatcttcttccaaaaaagtgttttaagttatgatgttacaatggcaggactttttctttagggaaggaattcagttgtgctgcaatgtattagattctataggtggagcagagtcatatagtgtatctgtatcatgtgtaggctcaccagctaatgtacaaggattagacagtgttccagcaccacagtcacagaaaaacctatcatgtctaataaactctacatcatgtccctgatggcacttcttaatgcagttcacacatatggcatttcgatctgcggtgttacaagtatgacatctgtagaaatcatgcatgggatagcttggtataanttgatattttatataaacattggcctctactaacagccttttctatggcatcttganngctcattnttcttgttatcttntcattgtcacattaaccccagcatgctaaaantaagcctccatacccgcttgttaagaatttgattgnccttctagtgnngcagtggcgngatttgtaatttncnttacctttccgcatancccaatccaatattcctggtnttcccttaagaa

SEQ ID NO: 993 - DNA, 362 bp, Homo sapiens
  misc_feature 124, 237, 242, 282, 292, 310, 320, 331, 336, 341, 354: n = A,T,C or G
ccttatttctcttgtcctttcgtacagggaggaatttgaagtagatagaaaccgacctggattactccggtctgaactcagatcacgtaggactttaatcgttgaacaaacgaacctttaatancggctgcaccatcgggatgtcctgatccaacatcgaggtcgtaaaccctattgttgatatggactctagaataggattgcgctgttatccctagggtaacttgttccgttggncaagntattggatcaattgagtatagtatttctgctttgactggngaagtcttancatgtactgctcggaggntgggttctgntccgatgtcgncccanccganatttttaatgcangtttggga

SEQ ID NO: 994 - DNA, 501 bp, Homo sapiens
  misc_feature 262, 272, 340, 355, 378, 379, 414, 429, 439, 440, 448, 463,471, 485, 491, 496: n = A,T,C or G
gaaacaacagcagagaatcatgttcctttgctgtggaacacataagccccacagttttccagtcagcctaatacatgggtatcccccgaccccatctgcctccttaagccacagtccttggtggggaactctaagggggacggagtcagtaccccggacagggccacatttgcatgagacatggctgtctcacaggtcacagagccattacaacagcttactagtttttcatggatttgttggattaacaccttaagcaggntttttattgntattttgtttgtttgtttgttttgagacgggagttttctctcttgtctcccaggctggagtgcaatcngcgcaatctcggctnacggtaacctctgcctcccaggnntcaagcgagtctcctgcctcagccttctgagtagnctgggattacaggcntgcgccaccnnacccaaantaattttgtattttntagtgggngacgggggttcctncctttnttggncaagg

SEQ ID NO: 995 - DNA, 374 bp, Homo sapiens; identical to SEQ ID NO: 376

SEQ ID NO: 996 - DNA, 304 bp, Homo sapiens
  misc_feature 127, 197, 204, 212, 229, 240, 259, 266, 269, 278, 279, 282,296: n = A,T,C or G
aaattccctctagataacagtcatcattggaaacaaccaagaaatgcattttatctgaatttgccacttaaaattctgccatttaccataatcgctttggaaggcatgggctactttcaagggtgcngatgatgacctacagttcatgacttacacaagggcgatgccactggggcttggtatgtttctcaagcatnattaccnatgccatncccattcataggttganggaacagctcngggcgacctttccttcaantgggctntancggaaagtnnaangggagtgaccctanaatgcgtt

SEQ ID NO: 997 - DNA, 344 bp, Homo sapiens
  misc_feature 133: n = A,T,C or G
ccttcagcaaatactcatagaagctgtctccaagtcctccaactgatacatgatgttgaccccactgtccactactgggattcagatagttaggataaaggcctggccatgttatgggatctcaacgaaggcnaacacctttacacgctagatggtggggacatcatcaacgccctgtgcttcagccctaaccgctactggctgtgtgctgccacaggccccagcatcaagatctgggatttagagggaaagatcattgtagatgaactgaagcaagaagttatcagtaccagcagcaaggcagaaccaccccagtgcacctccctggcctggtctgctgatgg

SEQ ID NO: 998 - DNA, 542 bp, Homo sapiens
  misc_feature 172, 181, 453, 472, 473, 517, 518, 523, 528, 533, 535: n = A,T,C or G
ccaggtcaggaactggggagggacaaagagagggagatattgagagagaggaagacgaggaagaaggcaacagaagcagaaaaagcagggactcaaggagccaggttaaagggctgcccctacactcaagggagcaacgagacccctctgccggtgcctcagaaaagtccanaaacccaancaggatggggacgtggggagttaacttttgaaagtttttagggctccaggagccttgggcacaaaaccccagagaacctgccgggggccagctgatttcttccacgccctctccgggctttccaatgtccacaggagctactgcagcactaacagtggctttggggcctgtatgtgaatgactgccatgtgtttgagggtgaggagagtgccatggattcttcattctattgaaaagtccttctcatttacaaacattcagggcgtgctctntttttctactctccacagnntacatgggcggggaggccagggtttctgtgatcttcagcttctnnaaggnctacnccccnanttccccc

SEQ ID NO: 999 - DNA, 285 bp, Homo sapiens
  misc_feature 131, 203, 227, 235, 240, 241, 250, 251, 265, 269, 273: n = A,T,C or G
ccatgccctgtcccactgccctgtgccaggctgtcgggccaccagtgccctcttgagacagtctccattggctccaagggttctgtgagccacagaaggttgtgaaaggagaagagcctgaagtgtggcangcaccagggcagcccaaagcagggctgcgttgaaaatatcaaaggatctctttaggggtggctctgagggtnggtgggattggagggggaaggggngccttggnatgannacagtttannatctattcttgggntccnggangagccactctct

SEQ ID NO: 1000 - DNA, 133 bp, Homo sapiens
gtcactgtagcgggacttcttttggttttctttctctttggggcacctctggactcactccccagcatgaaggcgctgagcccggtgcgcggctgctacgaggcggtgtgctgcctatcggaacgcagtctgg

SEQ ID NO: 1001 - DNA, 112 bp, Homo sapiens
  misc_feature 15, 27, 39, 46, 51, 53, 59, 65, 70, 82, 91, 95, 102, 105: n = A,T,C or G
atggccttcaagcanatggagcagatntctcagttcctncaagcanctgancnctatgncattangcacnaatgacatcttnaaaactgancacnttctggnaangaaaaaa

SEQ ID NO: 1002 - DNA, 273 bp, Homo sapiens; identical to SEQ ID NO: 477

SEQ ID NO: 1003 - DNA, 585 bp, Homo sapiens
  misc_feature 428, 438, 463, 493, 507, 509, 510, 545, 549, 552, 564, 567,584: n = A,T,C or G
gtggtcgtcatcgcggtgtctgtctactgctactggaggaagagccagcaggccgaacgagagtatgagaagatcaagtcccagctggagggcctggaggagagcgtgcgggaccgctgcaagaaggaattcacagacctgatgatcgagatggaggaccagaccaacgacgtgcacgaggccggcatccccgtgctggactacaagacctacaccgaccgcgtcttcttcctgccctccaaggacggcgacaaggacgtgatgatcaccggcaagctggacatccccgagccgcggcggccggtggtggagcaggccctctaccagttctccaacctgctgaacagcaagtctttcctcatcaatttcatccacaccctggagaaccagcgggagttctcggcccgcgccaaggtctacttcgcgtncctgctgacngtggcgctggacgggaaaactgganttcttacacggacatcatgcacacctcttnctggagctccttgnanncaattcgttggtgggacctgccccgggcgggccgnttcnaanagggcgaaattncancccacttgcgggcgttnt

SEQ ID NO: 1004 - DNA, 576 bp, Homo sapiens
  misc_feature 429, 473, 483, 487, 503, 516, 525, 537, 547, 557, 564, 572: n = A,T,C or G
ccaatcagtgggatccgaggtggctcggcccatcatgcccaggatctgagcccacatctggcaccagctctaccaagggcctgttgggcccacacaagcttgcctgtacctagtcaggctggtaccggcacctcctgaaatgggtcaccctccggttcctgctcagcagctctgagcccttttccagcctcttggagggaagtaacaacaacagcatctgccgaggagcacacggttcaggctccatcaatgacggtgatgtcgaggggccccagggctaccctccacctcgagttacctttgatcacaactagggcatctttctggctgagttaaggtgagaacagtcccctgaagcctcccccaaataagtgaaaagtgctctactgtggggtctggaaagaagaaacaaaaagcagcctattcacnttcacagtcgaaaaatgtaagctaaattgtaaacctgctcaaanaaaattctanaaangacctgccctggcggnccctctaaagggngaattccancacacttgcggncgttacttantgggatcccnacttcgnaccaagcnttgg

SEQ ID NO: 1005 - DNA, 436 bp, Homo sapiens
  misc_feature 311, 317, 319, 321, 329, 356, 378, 388, 391, 393, 415, 416,431: n = A,T,C or G
ccaccgggatagccgggggtctggcaggaatgggaggcatccagaacgagaaggagaccatgcaaagcctgaacgaccgcctggcctcttacctggacagagtgaggagcctggagaccgagaaccggaggctggagagcaaaatccgggagcacttggagaagaagggaccccaggtcagagactggagccattacttcaagatcatcgaggacctgagggctcagatcttcgcaaatactgtggacaatgcccgcatcgttctgcacattgacaatgcccgtcttgctgctgatgactttagagtcaantatganananagctgganctgcccgggcggccgctcgaaatggcnaattccacacactggcggccgntactagtcgnatncnagctcggtaccaaccttggtcnntatctgggtcatagncttgt

SEQ ID NO: 1006 - DNA, 438 bp, Homo sapiens
  misc_feature 418, 433: n = A,T,C or G
cctttgggaaaggtgggagagctagaggaataattaaagctggtggaactcagttggagtttagaaagcttcccataaaatgcctgcttgatgctgagttgggaggggagagaagaaggctccagaggctcactgagccccttccctggctctcggggtaatttccagaagggcaagtccatgacaaagggcatcccttccaagtgacccaccagttccaggggactatgcccagtagctttcctgttctcggcatttgccttaagaggaccccccacaaaagtcttctcattcttgacgctgccaacaaaggcatgtggctttggagcccagtcttcccttggagtctgtaccccaccagacatggagtttgtgcttggtcccaacttcccactgggaaaaactggagggatctcancaggaagaggcatcnggtcc

SEQ ID NO: 1007 - DNA, 116 bp, Homo sapiens
  misc_feature 76, 94, 95: n = A,T,C or G
ctaatcgccacacaccagcaaaggcaggttatgctatagtacaagccactagcccacctctcagaacctctcattncctttccatcgcggaaanntatcctcaaggaaataacttc

SEQ ID NO: 1008 - DNA, 220 bp, Homo sapiens
gcaacacctaccaagccatcctctccacggacgggagcaggtcctatgccctgtttctctaccagagcggtgggatgcagtgggacgtggcccagcgctcaggcaagccggtgctcatgggcttctctagtggagatggctatttcgaaaacagcccactgatgtcccagccagtgtgggagaggcatcgccctgatagattcctgaattccaactcagg

SEQ ID NO: 1009 - DNA, 96 bp, Homo sapiens
cctactaaccaacacactaaccatataccaatgatggcgcgatgtaacacgagaaagcacataccaaggccaccacacaccacctgtccaaaaagg

SEQ ID NO: 1010 - DNA, 550 bp, Homo sapiens
  misc_feature 394, 400, 407, 417, 434, 442, 445, 463, 469, 477, 478, 487,493, 534, 538, 540, 544: n = A,T,C or G
aaagaaaattcacacatcacatattctattggtccccaaattctctaaggacttgggttacccctctgaccatctgaggagtgcacgggagcacatggtggggtagaaggagaagtatggagtgggagaatattgtaggggataagtccttgagaacaaacatcagactgaaggcaatcttaccttggatcttgaagacagaccttctcacctctaagtgtttctgtttatccattacttaggggccttttataaagagatgtcctcatcccttagtctcatcctaacgaggatctatataaaagcgcctaacacagtgcctggcacatcgtaggtgtattcttttccttcctaaagggggcacaaagatgtcttgatcaaggaaaggaaatcnaccttnaaagttnaatggcgaanattgcatttgcactgtnggtccctnaangaaaagagaaaaaaagtnccactnttccagannattcaaccncacttngaatcaaattgagaggggagggagaattcctttcccctcancctnanaaanacaacc

SEQ ID NO: 1011 - DNA, 334 bp, Homo sapiens
  misc_feature 252, 307, 319, 325: n = A,T,C or G
ccaagccctccatctccagcaacaactccaaacccgtggaggacaaggatgctgtggccttcacctgtgaacctgaggctcagaacacaacctacctgtggtgggtaaatggtcagagcctcccagtcagtcccaggctgcagctgtccaatggcaacaggaccctcactctattcaatgtcacaagaaatgacgcaagagcctatgtatgtggaatccagaactcagtgagtgcaaaccgcagtgacccantcaccctggatgtcctctatgggccggacacccccatcatttcccccccagactngtcttacctttngggagngaccctaac

SEQ ID NO: 1012 - DNA, 50 bp, Homo sapiens
tttttttttttttttttttttttttttttttttttttttttttttttttt

SEQ ID NO: 1013 - DNA, 434 bp, Homo sapiens
  misc_feature 267, 272, 347, 356, 382, 388, 392, 397, 409, 412, 418, 423: n = A,T,C or G
ccagtcctacaaccagtattctcagagataccatcagagaacaaacactaatgttaattgcccaattgagtgcttcatgcctttagatgtacaggctgacagagaagattcccgagagtaaatcatctttccaatccagaggaacaagcatgtctctctgccaagatccatctaaactggagtgatgttagcagacccagcttagagttcttctttctttcttaagccctttgctctggaggaagttctccagcttcagctcaactnacagnttctccaagcatcaccctgggagtttcctgagggttttctcataaatgagggctgcacattgcctgttctgcttngaagtattnaataccgctcagtattttacctccgncgcgancacnctaanggccaattccanaanactggnggtcnttctagtggat

SEQ ID NO: 1014 - DNA, 552 bp, Homo sapiens
  misc_feature 444, 454, 466, 471, 500, 503, 532, 538, 545: n = A,T,C or G
gtgaaatggagaagtatctgacacctcagcttcctccagttcctataattccagagcataaaaagtatagacgagacagtgcctcagtcgtagaccagttcttcactgacactgaagggttaccttacagtatcaacatgaacgtcttcctccctgacatcactcacctgagaactggcctctacaaatcccagagaccgtgcgtaacacacatcaagacagaacctgttgccattttcagccaccagagtgaaacgactgcccctcctccggccccgacccaggccctccctgagttcaccagtatattcagctcacaccagaccgcagctccagaggtgaacaatattttcatcaaacaagaacttcctacaccagatcttcatctttctgtccctacccagcagggccacctgtaccagctactgaatacaccggatctanatatgcccanttctcaaatcanacagnagcaatggacactctttaatgtttctttntanctgccatgggcaggacctgcccgggcggncgttcnaagggcnaattcca

SEQ ID NO: 1015 - DNA, 344 bp, Homo sapiens
  misc_feature 334: n = A,T,C or G
ccttcagcaaatactcatagaagctgtctccaagtcctccaactgatacatgatgttgaccccactgtccactactgggattcagatagttaggataaaggccaggccatgttatgggatctcaacgaaggcaaacacctttacacgctagatggtggggacatcatcaacgccctgtgcttcagccctaaccgctactggctgtgtgctgccacaggccccagcatcaggatctgggatttagagggaaagatcattgtagatgaactgaagcaagaagttatcagtaccagcagcaaggcagaaccaccccagtgcacctccctggcctggnctgctgatgg

SEQ ID NO: 1016 - DNA, 304 bp, Homo sapiens
aaaaaattacatacaaacagcttgtattatattttatattttgtaaatactgtataccatgtattatgtgtatattgttcatacttgagaggtatattatagttttgttatgaaagtatgtactttgccctgcccacattgcaggtgttttgtatatatacaatggataaattttaagtgtgtgctaaggcacatggaagaccgattttatttgcacaaggtactgagatttttttcaagaaacagctgtcaaatctcaaggtgaagatctaaatgtgaacagtttactaatgcactactgaag

SEQ ID NO: 1017 - DNA, 250 bp, Homo sapiens
cctatgtttctcttattcctatttcataaaatgatctacaacaaagacattttcacagaggcaaactggaaaggaatccttcacacaacactcttctattatcttgaacgtctgaatagcttttcctttggagaactcaaatgcttccgcaaacattatcttattcttacaacaatttagtgatcatgcctataatcccagcaccctgggtggccgaggcaggaggactgcttgagctcaggagttagag

SEQ ID NO: 1018 - DNA, 375 bp, Homo sapiens
  misc_feature 266, 302, 318, 320, 339, 348, 352, 356, 367: n = A,T,C or G
ccaccgcagaacaccgaagtaattccagcatagcggggaagatgttgaccaaggtggagaagaatcacgaaaaggagaagtcacagcacctagaaggcagcacctcctcttcactctcctctgattagatgaaactgttaccttaccctaaacacagtatttctttttaacttttttatttgtaaactaataaaggtaatcacagccaccaacattccaagctaccctgggtacctttgtgcagtagaagctagtgagcatgtgancaagcggtgtgcacacggagactcatcgttataatntactatctgccaagantncaaagaaaggctggggatntttgggttnggcntggntttcatctttngcttgttt

SEQ ID NO: 1019 - DNA, 280 bp, Homo sapiens
  misc_feature 81, 96, 124, 135, 164, 167, 168, 201, 212, 214, 222, 227,255, 262, 271: n = A,T,C or G
caagggtcatgatggcaggagtaatcagaggtgttcttgtgttgtgataagggtggagaggttaaaggagccacttattantaatgttgatagtanaatgatggctagggtgacttcatatganattgtttgggntactgctcacagtgcgcccgatcagggcngtnntttgagtttgatgctcaccctgatcagaggatngagtaaacggntnggctatangcggntataataaatatgaggacctccgccgcntaccacnctaatggcnaattccatc

SEQ ID NO: 1020 - DNA, 365 bp, Homo sapiens
cctctgcctgctggggattactcgatcaaaaccttccttccctggctacttcccttcctcccggggccttccttttgaggagctggaggggtggggagctagaggccacctatgccagtgctcaaggttactgggagtgtgggctgcccttgttgcctgcacccttccctcttccctctccctctctctgggaccactgggtacaagagatgggatgctccgacagcgcctccaattatgaaactaatcttaaccctgtgctgtcagataccctgtttctggagtcacatcagtgaggagggatgtgggtaagaggagcagagggcaggggtgctgtggacatgtgggtggagaagggagggtgg

SEQ ID NO: 1021 - DNA, 425 bp, Homo sapiens
  misc_feature 281, 305, 340, 360, 362, 374, 384, 397, 399, 404, 418: n = A,T,C or G
ccaggccccggaggctaaggacggcagctcctttagcggcagagttttccgagtgaccttcttgatgctggctgtttctctcaccgttcccctgcttggagccatgatgctgctggaatctcctatagatccacagcctctcagcttcaaagaacccccgctcttgcttggtgttctgcatccaaatacgaagctgcgacaggcagaaaggctgtttgaaaatcaacttgttggaccggagtccatagcacatattggggatgtgatgtttactgggacancagatggccgggtcgtaaaacttnaaaatggtgaaatagagaccattgcccggtttggntcgggcccttgcaaaacccnanatgattaacctntgtgtggganacccctgggtatncntgcanggcccaatgggaantctcttt

SEQ ID NO: 1022 - DNA, 131 bp, Homo sapiens
  misc_feature 83, 84, 95, 96, 122, 127: n = A,T,C or G
aaatatttgtgactctttcctaaagccaaagtttctgttgaattatgttttgacacaccccctaagaacaaggtggcgatggnngcatacgcatnntccttttcggggattcaaaaacaggnattcnatgt

SEQ ID NO: 1023 - DNA, 213 bp, Homo sapiens
ccagcgggcccagcaatctccatgtgtacttattacagtcttatttaaccaggggtcctaaccactaacattgtgactttgctttgagacctttcctctcctgggtactgaggtgctatgaagccaactgacaaagatgcatcacgtgtcttaggctgatgccactacccgatttgtttatttgcaatttgagccatttaaagaccaataaac

SEQ ID NO: 1024 - DNA, 303 bp, Homo sapiens; identical to SEQ ID NO: 457

SEQ ID NO: 1025 - DNA, 490 bp, Homo sapiens
  misc_feature 469: n = A,T,C or G
cgccgcttgtgctgcagccatgtctctagtgatccctgaaaagttccagcatattttgcgagtactcaacaccaacatcgatgggcggcggaaaatagcctttgccatcactgccattaagggtgtgggccgaagatatgctcatgtggtgttgaggaaagcagacattgacctcaccaagagggcgggagaactcactgaggatgaggtggaacgtgtgatcaccattatgcagaatccacgccagtacaagatcccagactggttcttgaacagacagaaggatgtaaaggatggaaaatacagccaggtcctagccaatggtctggacaacaagctccgtgaagacctggagcgactgaagaggattcgggcccatagagggctgcgtcacttctggggccttcgtgtccgaggccagcacaccaagaccactggccgccgtggccgcaccgtgggtgtgtccaanaaagaaataagtcttgtagga

SEQ ID NO: 1026 - DNA, 356 bp, Homo sapiens
  misc_feature 138, 155, 206, 207, 253, 259, 269, 279, 285, 297, 311, 313,316, 329, 330, 345, 355: n = A,T,C or G
aaaacttctagcatgtaagaagatccatctttccttccaacgcctttggataataacagcagaatcccggagatctgctgctgagtttgagaaggccaagtttaaggattccaaactccagccttcaatatttctgcngaaacttagagaagtancctccccgtcctctccgctggcttccccaagtacagatgcaggatgcaggnntttcttcctgctacccaggcaccgaggactcaaaccatctcaccgnctcatnactgggcttnttcaatgggntcttgnaggaagaacctnttcctttttgccantnttnaggcccttagaannacccttttttttaangaaaaagcang

SEQ ID NO: 1027 - DNA, 425 bp, Homo sapiens
aaaggaattaggagccagaaagataaatgcaactccttcaactacgtgacagggcagactggtgaatctgggttcccagagtgtggagcaagtgccctgcatcagagaatggcccagggggaacgtgcatgatgctgaaccccgcaggacagaattacttcaatcgcctgctcctgactactataaggacgaagcctcagtgtctcagtttggatctacgctgggatttctttcttttggagacagtgtctccctctgtcgcccaggctggagtgcagtggtgtgatcttggctcactgcaacctccacctcctgggttcaagcaatgctgcctcagcctccccagtagctgggactacaggcgtgtgccaccacacccggctaatttttgtatttgtagtatagacggggtttcatcatgttgg

SEQ ID NO: 1028 - DNA, 577 bp, Homo sapiens
  misc_feature 320, 322, 427, 444, 462, 472, 531, 547, 551, 562, 564, 574: n = A,T,C or G
cctctataaacaaggacaacattggctagagaaaaaagatgttgtggggagagccaggggatttgttccttatattggaattgtgacgatcctcatgaatgactatcctaaatttaagtatgcagttctctttttgctgggtttattcgtgctggttcatcgtgagtaagaagcctgccttgctgttcctgggaagatgccatagttttcgttactggatgtttggagtagatactggtctgtgattggtggaatggagaacacacgtgttggtgcttctgggtagcactggtttgcattagtttatgtttccatgccanantttgtgtgggcgggcgcatgtgcaccacagagtgcactcgaggggactttcagtcacaggatttcataattgtcattgtcacactttcaaatttttgtacatcanggaatttttttatattnaaaggttggagcccaaancccccagtgntttgtattttgaagccaagctttcacttcttaaagtgcctaccgagactttgtaaatgnaaaatgcagctctgcncgantttgaaaaccntntacctccttnttt

SEQ ID NO: 1029 - DNA, 331 bp, Homo sapiens
aaaaacggttatactataaaatctgcttttcacactgggtgataataacttggacaaattctatgtgtattttgttttgttttgctttgctttgttttgagacggagtctcgctctgtcatccaggctggagtgcagtggcatgatctcggctcactgcaacccccatctcccaggttcaagcgattctcctgcctcctcctgagtagctgggactacaggtgctcaccaccacacccggctaattttttgtatttttagtagagaccggggtttcaccatgttgaccaggctggtctcgaactcctgacctggtgatctgcccacccagg

SEQ ID NO: 1030 - DNA, 201 bp, Homo sapiens
ccacagttgtggggcagccaaacactcccacgtctgcggggaaggggggcttcaggcggggcttgccctgcttgccctcaatggactcgatgagcgctgtctcctctccacagatgtaggccccagccccgcgcaccacaaacacgtcaaaatcatagccagagccacaagcattcttgccaatcagacctgcctcatagg

SEQ ID NO: 1031 - DNA, 192 bp, Homo sapiens; identical to SEQ ID NO: 681

SEQ ID NO: 1032 - DNA, 427 bp, Homo sapiens
  misc_feature 358, 408, 410: n = A,T,C or G
cctgattctcgcgattattctcgaatcacctcctgtgttgtgctgggagcaggactgattgaattacggaaaatgcctgtaaagtctgagtaagaaacttcatgctggcctgtgtgatacaagagtcagcatcattaaaggaaacgtggcaggacttccatctgtgccatacttgttctgtattcgaaatgagctcaaattgattttttaatttctatgaaggatccatctttgtatatttacatgcttagaggggtgaaaattattttggaaattgagtctgaagcactctcgcacacacagtgattccctcctcccgccactccacgcagctggcagagagcacagtgatcaccancgtgagtggtggaggaggacacttggatatttttttagtttttttttttngncttaacagtcttaaaaa

SEQ ID NO: 1033 - DNA, 199 bp, Homo sapiens
ccagcgggcccagcaatctccatgtgtacttattacagtcttatttaaccaggggtcctaaccactaacattgtgactttgctttgagacctttcctctcctgggtactgaggtgctatgaagccaactgacaaagatgcatcacgtgtcttaggctgatgccactacccgatttgtttatttgcaatttgagccattt

SEQ ID NO: 1034 - DNA, 193 bp, Homo sapiens
catgtggaaggtgctcctcccttcaacccagtaaattcaatctctctgagactttgttaggtgtaaaaatgttaatcagaaataattataacaacaatagtttatttacagtactcccagtaaattctaaagagggagacaaaagttagacttaacttagttcccacagggatccaccaggattggagactga

SEQ ID NO: 1035 - DNA, 527 bp, Homo sapiens
  misc_feature 406, 443, 448, 454, 473, 476, 482, 486, 495, 503, 515, 517: n = A,T,C or G
cctcaccgccgatgcaaggatagtcatcaacagggcccgggtggagtgccagagccaccggctgactgtggaggacccggtcactgtggagtacatcacccgctacatcgccagtctgaagcagcgttatacgcagagcaatgggcgcaggccgtttggcatctctgccctcatcgtgggtttcgactttgatggcactcctaggctctatcagactgacccctcgggcacataccatgcctggaaggccaatgccataggccggggtgccaagtcagtgcgtgagttcctggagaagaactatactgacgaagccattgaaacagatgatctgaccattaagctggtgatcaaggcactcctggaagtggttcagtcaggtggcaaaaacattgaacttgctgtnatgaggcgagatcaatccctcaagattttacctcggnccgcnaccacncttaagggcgaaattccancanacttgncggncgttactantggatccnaacttggttccnantttgcgtaat

SEQ ID NO: 1036 - DNA, 438 bp, Homo sapiens
aaatgttatgacaacatactcccaagaagaaccttttcttcagttaagttaattatacatttcaataaaataaaggataatggattagtggaagttagcttgtgaatttttcttaaaaataaaactccaactctattaatccatgccagttaaacactataactaaaatttccaaataagcgcaaaaggagatgaagcagttagttaccttttttgcttgaacagtccaaaggaaaatggttactataaatacagcaggcaaactgttagactgacctagaacatagtgtactaaatttcagtctcaaattgtgctaaatgctcatcattagtatggcacatttggtccatgatgtggtttaatgccaagacagatcccaatttgttacagaaacacatagattactgttgctttttgtttttaaatacatatatttt

SEQ ID NO: 1037 - DNA, 374 bp, Homo sapiens
ccttgcctgtgaagctcattgggatgaattgcactctaatgaagcaatacattgagtttgtggcagacagacttatgctggaactgggttttagcaaggttttcagagtagagaacccatttgactttatggagaatatttcactggaaggaaagactaacttctttgagaagagagtaggcgagtatcagaggatgggagtgatgtcaagtccaacagagaattcttttaccttggatgctgacttctaaatgaactgaagatgtgcccttacttggctgatttttttttccatctcataagaaaaatcagctgaagtgttaccaactagccacaccatgaattgtcccgtaatgttcattaacagcatcttt

SEQ ID NO: 1038 - DNA, 444 bp, Homo sapiens
  misc_feature 402: n = A,T,C or G
ccattggactaactggcacggggcctctctagggaagtctggttgtagagcctgaataggctcctggccccatgaccccttctcctgtccccagctcccatcccagttgtgggttaagaataggctagagcagacattgggtgtttccatgctgtaggctggtgggggaccatgtgcctctaggcagtgactagggtgcccccacccctcaggaagaacacaggtgggctcctagcagctgatccccaatgcctggccttaaagccgagctcagttaccatagggacaggtccacctctactgggccctcatgcttgcctttcctggcccccaggcccagcccctttttactggggcagtttcgttattttgacttgatgccttttgaataactttcaatanaattgtctaaaattatcttactggttgttaggacctcgccgc

SEQ ID NO: 1039 - DNA, 569 bp, Homo sapiens
  misc_feature 456, 482, 499, 530, 533, 536, 543, 549, 569: n = A,T,C or G
aaaactacgactcagcatacattttcccacatacatttttacattgtaccttaggactcagtcatctccacttaaattgatgacacaagcagctaataaccatttctgggtttctgcctaaccccctaattgtctgttaaagccaattctctgggtgtcccagtgagtggtggctttttttctttccacattggcacattcacttctcccactcttggcgtgtaagaaataagcatttacataattggaaaaatctggatttctgatgccaaagggttaaagcttcttggatttcatttcattgatatacagccactattttatttttgatcagtggcctttgggccactgttcagggtactgaccatcagtgtcagcattagggttttggtttttgtttcttttgggtctttcttttttggcacatgtgaatcttgttttgtgtaaaatgaaatnctttctcttgttctctgatgatgggnttacctgcccgggcggncgctcgaaagggcgaattccacacactggcnggncgntactagnggatcnagctcggtccaacttgcgtn

SEQ ID NO: 1040 - DNA, 291 bp, Homo sapiens
cctccctgtcgcctgggtgcccacggggctctgactttcccccgttaccagcctcgtggctgtccccggagatgctgagagtgacagcttgagagtttgattcttacataagcgggaagcagtgagaagtcacccgcccaccacgtccctccgttcctgttggcacccccccatcctaccatctgtggcccccgtgggccctgacttgctaaggcgctggcgggcatagccttgggagcactggggtacatacatggccttgtagcacgaaggcccactccaaggttctgg

SEQ ID NO: 1041 - DNA, 428 bp, Homo sapiens
ccagggactatgcagccatcgtcttctttgctaacaaccgctttgagacagggaagaaaaaactgcagtatctgagcttcggtgactttgccttctgcgctgagctcatgatccaaaactggacccttggagccgtcgactcacagatggatgacatggacatggacttagacaaggaatttctccaggacttgaaggagctcaaggtgctagtggctgacaaggaccttctggacctgcacaagagcctggtgtgcactgctctccggggaaagctgggcgtcttctctgagatggaagccaacttcaagaacctgtcccgggggctggtgaacgtggccgccaagctgacccacaataaagatgtcagagacctgtttgtggacctcgtggagaagtttgtggaaccctgccgctccgaccactgg

SEQ ID NO: 1042 - DNA, 577 bp, Homo sapiens
  misc_feature 444, 546, 549, 555, 558, 562, 576, 577: n = A,T,C or G
aaatgtgtttttcctgagggacaaggaagacttgggtatttcccaaaacaggtaaaaatcttaaatgtgcaccaagagcaaaggatcaacttttagtcatgatgttctgtaaagacaacaaatccctttttttttctcaattgacttaactgcatgatttctgttttatctacctctaaagcaaatctgcagtgttccaaagactttggtatggattaagcgctgtccagtaacaaaatgaaatctcaaaacagagctcagctgcaaaaaagcatattttctgtgtttctggactgcactgttgtccttgccctcacatagacactcagacaccctcacaaacacagtagtctatagttaggattaaaataggatctgaacattcaaaagaaagctttggaaaaaaagagctggctggcctaaaaacctaaatatatgatgaanattgtaggactgtcttccaacccctgttcatgggtggggcaatggttatttggttattttactcaattgggtacttctcatttgaaaatgagggaggggcantcngcaatnggnaccnggtgtttgctttcnn

SEQ ID NO: 1043 - DNA, 536 bp, Homo sapiens
  misc_feature 145, 289, 312, 341, 402, 403, 462, 495, 498, 515, 519, 520,525: n = A,T,C or G
gaacgacctgctcagaatgagaagaggaaggagaaaaacataaaaagaggaggcaatcgctttgagccatatgccaatccaactaaaagatacagagccttcattacaaacataccttttgatgtgaaatggcagtcacttaaanacctggttaaagaaaaagttggtgaggtaacatacgtggagctcttaatggacgctgaaggaaagtcaaggggatgtgctgttgttgaattcaagatggaagagagcatgaaaaaagctgcggaagtcctaaacaagcatagtntgagcggaagaccactgaaagtnaaagaagatcctgatggtgaacatgccangagagcaatgcaaaaggtgatggctaccactggtgggatgggtatgggaccacgtggcccnngaatgatttctattccacccagtttcctaataattccacatcccaaatgagattatccntgcctttccagcctggaagacttggtaagcacncgntttgtaccaaatctggntttnnaactnggctgggaaga

SEQ ID NO: 1044 - DNA, 179 bp, Homo sapiens
ccagactccaatccagagaaccatcaagccagatgtcagaagctacaccatcacaggtttacaaccaggcactgactacaagatctacctgtacaccttgaatgacaatgctcggagctcccctgtggtcatcgacgcctccactgccattgatgcaccatccaacctgcgtttcctgg

SEQ ID NO: 1045 - DNA, 589 bp, Homo sapiens
  misc_feature 17, 21, 44, 80, 250, 262, 389, 420, 434, 444, 446, 453, 464,506, 509, 512, 520, 527, 533, 539, 545, 551, 561, 567: n = A,T,C or G
ccaggatcctatgcganaacncggacaacatcacccgggtgcanagcgacgtgttcagggtggcggagttccctcacggntacggcagctgtgacgagatccccagggtggacctccgggtgtggcaggactgctgtgaagactgtaggaccagggggcagttcaatgccttttcctatcatttccgaggcagacggtctcttgagttcagctaccaggaggacaagccgaccaagaaaacaagaccacngaaaatacccantgttgggagacagggggaacatctcagcaacagcacctcagccttcagcacacgctcagatgcatctgggacaaatgacttcagagagtttgttctggaaatgcagaagaccatcacaagacctcanaacacagataaaggaaacttgaattacgggntcagtaccacagantgcgtggatncngggggcngaaatctcacnccaacaacaccaaatgggaaaaagaagcatgcaccatttttnaangcnaagaccgncaaggtncccctngtttcntggaanctttgnccccttgccnccctgngcttgttccctgaaaattcccg

SEQ ID NO: 1046 - DNA, 148 bp, Homo sapiens
  misc_feature 101, 119, 123, 134, 135: n = A,T,C or G
ccaggatcctatgcgacaacgcggacaacatcacccgggtgcagagcgacgtgttcagggtggcggagttccctcacggctactgcagctgtgacgagatncccatggtggacctcccngtgnggcactgactnntcttaattaatga

SEQ ID NO: 1047 - DNA, 275 bp, Homo sapiens
  misc_feature 241: n = A,T,C or G
ccatggctaggtttatagatagttgggtggttggtgtaaatgagtgaggcaggagtccgaggaggttagttgtggcaataaaaatgattaaggatactagtataagagatcaggttcgtcctttagtgttgtgtatggttattatttgttttgaggttagtttgattagtcattgttgggtggtgattagtcggttgttgatgagatatttggaggtggggatcaatagagggggaaatanaatgatcagtactgcggcgggtaggacctctgcc

SEQ ID NO: 1048 - DNA, 338 bp, Homo sapiens
ccacaagaaggggagctttctggagggcagtgaggtccgaacgatcgtcattaactacgccaagaaaaatgacctggttgatgcagacaacaaaaatcttgtgagattggatcccatcctatgtgactgcatcttagagaaaaatgaacagcatacagtcatgaagcttccatgggacagtcttctgaccaggtgtttggaaaaattacagcctgcctatcaagtgacccttcccggacaagagcccattgtgaagaaagggagaatctgtccaattgacatcaccctagcacaaagagcgtctaataaaaaggtgaccgtggtccggaacttggagg

SEQ ID NO: 1049 - DNA, 220 bp, Homo sapiens
ccaaatcaccgacctgaaggcggaaattcacgggggcagtctcattaatctgacttggacagctcctggggatgattatgaccatggaacagctcacaagtatatcattcgaataagtacaagtattcttgatctcagagacaagttcaatgaatctcttcaagtgaatactaccgctctcatcccaaaggaagccaactctgaggaagtctttttgttt

SEQ ID NO: 1050 - DNA, 434 bp, Homo sapiens
ccattggactaactggcacggggcctctctagggaagtctggttgtagagcctgaataggctcctggccccatgaccccttctcctgtccccagctcccatcccagttgtgggttaagaataggctagagcagacattgggtgtttccatgctgtaggctggtgggggaccatgtgcctctaggcagtgactagggtgcccccacccctcaggaagaacacaggtgggctcctagcagctgatccccaatgcctggccttaaagccgagctcagttaccatagggacaggtccacctctactgggccctcatgcttgcctttcctggcccccaggcccagcccctttttactggggcagtttcgttattttgacttgatgccttttgaataactttcaatagaattgtctaaaattatcttactggttgttagg

SEQ ID NO: 1051 - DNA, 205 bp, Homo sapiens; identical to SEQ ID NO: 511

SEQ ID NO: 1052 - DNA, 243 bp, Homo sapiens
  misc_feature 237: n = A,T,C or G
aaaccttaaattaaaaaaagaaaacattttcacacagaagaattatctgctttgagaaataaagaaattagaaggtgtaaaaaaaaatttttcaaaccccaaataatgataaaaatagatgtatcctctgtaaaaatctggactaaactattcagtcattcatggttattcagtattcagagcatgaagtgaaacaccaaagtataaaaaattaaaaaaaaaaaaaaaaaagggatnccgaaa

SEQ ID NO: 1053 - DNA, 156 bp, Homo sapiens
  misc_feature 67, 76, 79, 86, 96, 104, 113, 118, 139, 141: n = A,T,C or G
aaatatataatacaattcagaatgataaagatatctacattaaggcatcaaaaagaaaaaaaaaaanaaagcaaanacnggaagtntacttgcccnctcagtanttaacaaanatttntgtaaaattcccacaaattgntntcagaatcaaaatca

SEQ ID NO: 1054 - DNA, 398 bp, Homo sapiens
  misc_feature 8, 46, 51, 86, 116, 117, 124, 154, 155, 173, 202, 230, 249,267, 274, 288, 344, 388: n = A,T,C or G
aaatacantatttttctcataaaaaaaaaatccaggaagtgcctanctccntggtttctataccatatgtacatgaaagctgacanagagcctgacaaatgttctggatgtaacannatgaacncctatgagctgggactcttctgaatcaaanntaaaaaacacatattaancactgcttaagaaaaaaaaatccagtttntgaacaaccaaaagagaacagagttagnatatgtacaaaaccaggtnttaaaaaacagaaagaanttcagcncacaaaaaactcanacaacccatatgtagtgaactgtatatactgcagttaatgaaaaccctcctacaanaagttgatttaggatttgaaattttacctgcccggggcggccgntccgaaaggg

SEQ ID NO: 1055 - DNA, 383 bp, Homo sapiens
aaaagactagattgaatgtccctagattttcacacattcaaagactacattttttcaagagatggaatgggacacaaagcaagaatgaacggttctatactctcgaagaaagaaacccgggacatggtggggatccctggcctaggtgttcaaggtggtggcatcctgaacttccagcagttccctagcccggttccactaatgtcattccgcggctggagttaaagaagcaaacggtctacgtcaccaagaccatgagacggtttcaaaaatggtctacgtcaccaagaccatgagatggtttcacacaataggcttggcctatgagaggaggggaagcagcttcttactcagctggggaggcccttatactggggtgcagg

SEQ ID NO: 1056 - DNA, 374 bp, Homo sapiens
  misc_feature 174, 215, 290, 332, 334, 352, 356, 364: n = A,T,C or G
aaaattaggctgaatgtacttcatgtgatttgtcaaccatagtttatcagagattatggacttaattgattggtatattagtgacatcaacttgacacaagattagacaaaaaattccttacaaaaatactgtgtaactatttctcaaacttgtgggatttttcaaaagctcantatatgaatcatcatactgtttgaaattgctaatgacagantaagtaacactaatattggtcattgatcttcgttcatgaattagtctacagaaaaaaaatgttctgtaaaattantctgttgaaaatgttttccaaacaatgttactttgaaaattnantttatgtttgacctaaangggntaaaattncatttcaata

SEQ ID NO: 1057 - DNA, 464 bp, Homo sapiens
  misc_feature 231, 267, 331, 346, 389, 392, 403, 425, 430, 436, 438, 450,454, 457: n = A,T,C or G
ccactgggcccgggaatgtcctactggtggaggccgtggtcgtggaatgagaagccgtggcagaggtggttttacctcggatagaggtattttgtcgaatagaaaaatttgaagtacttcagtatttgttagtatcaaagactggctgactagccgaattctttgtttttgctcaaaacaggtttccagtttgtttcctcgtctcttccagacatttgttatcgctgtggngagtctggtcatcttgccaaggattgtgatcttcangaggatggtaagtatttaacacttccttttcatacccctttagagctttggagaggtgagcacntgcaactgtgtatancattccacctttgaggttttgtattgtataattaacctgcccnggncggccccttantgggcgaaattccaccacactnctcgnccgttncnagtgggatcctnagcnccngttacca

SEQ ID NO: 1058 - DNA, 397 bp, Homo sapiens
  misc_feature 385: n = A,T,C or G
cctccaccatggccttcaagcagatggagcagatctctcagttcctgcaagcagctgagcgctatggcattaacaccactgacatcttccaaactgtggacctctgggaaggaaagaacatggcctgtgtgcagcggacgcttgatgaatctgggtgggctggcagtagcccgagatgatgggctcttctctggggatcccaactggttccctaagaaatccaaggagaatcctcggaacttctcggataaccagctgcaagagggcaagaacgtgatcgggttacagatgggcaccaaccgcggggcgtctcaggcaggcatgactggctacgggatgccacgccagatcctctgatcccaccccaggacctgcccggggcggncgctcgaaaggg

SEQ ID NO: 1059 - DNA, 207 bp, Homo sapiens
cctgtcatgccacaggctgtggccgctgcctggccaacgggggcatccactacatcacccttgatggccgtgtctacgacctgcatggctcctgctcctatgtcttggcccaagtctgccacccaaagcctggggacgaggacttttcatcgtgcttgagaagaatgcagctggagatctccaacgcctcctggttactgtggctgg

SEQ ID NO: 1060 - DNA, 130 bp, Homo sapiens
cctctactgcagcggctgggtgaagagaggacctacaggtgtcatagccacaaccatgactgacagcttcctcaccggccagatgctgctgcaggacctgaaggctgggttgctcccctctggccccagg

SEQ ID NO: 1061 - DNA, 540 bp, Homo sapiens
  misc_feature 408, 449, 460, 486, 501: n = A,T,C or G
ccaaaccagactcttctctggtttgttcttcagaccacgaggtggaaccatctcttcaaaggagccctgccaccatcaccaaagctcacaccagaaaaaaccgccatttacacaacaaactgaacctgaagaaggaacggaacatggtgcttccgccgtgaacaaaatcagcaagtgaatccgttttcctttcccgggctgttcgaaaagattcggctagagaaaagggggcactgtgggcagcccgtaggggatggcctggagctgtggggcccgggctgagccctccctgccttttaactgcaggatgtaaactctatggaaatgtatagaacttcagtttctcccaaccctccacaacctcaactcttgagaccaccaaataacttgttaggaaaacgcaagaanagagtccttcaaatgagctacacccaggttcagagcggcanaaaccaacagngtgacttggggcatggaggtaaattntgacaccaatgggangggaatttcccaaaacaaaatttcatgaagtaaacacgc

SEQ ID NO: 1062 - DNA, 386 bp, Homo sapiens
  misc_feature 309, 328, 366: n = A,T,C or G
aaaatatatgtatttaaaaacaaaaagcaacagtaatctatgtgtttctgtaacaaattgggatctgtcttggcattaaaccacatcatggaccaaatgtgccatactaatgatgagcatttagcacaatttgagactgaaatttagtacactatgttctaggtcagtctaacagtttgcctgctgtatttatagtaaccattttcctttggactgttcaagcaaaaaaggtaactaactgcttcatctccttttgcgcttatttggaaattttagttatagtgtttaactggcatgggattaataaanttgggaggtttattttaanaaaaaattcacaaagctaccttccctaaaccctttttncttttattttatttggaaaa

SEQ ID NO: 1063 - DNA, 234 bp, Homo sapiens
cctcctcagagcggtagctgttcttattgccccggcagcctccatagatgaagttattgcaggagttcctctccacgtcaaagtaccagcgtgggaaggatgcacggcaaggcccagtgactgcgttggcggtgcagtattcttcatagttgaacatatcgctggagtggtcttcagaatcctgccttctgggagcacttgggacagaggaatccgctgcattcctgctggtgg

SEQ ID NO: 1064 - DNA, 518 bp, Homo sapiens
  misc_feature 189, 289, 352, 389, 399, 418, 430, 446, 454, 464: n = A,T,C or G
ccaggatcctatgcgacaacgcggacaacatcacccgggtgcagagcgacgtgttcagggtggcggagttccctcacggctacggcagctgtgacgagatccccagggtggacctccgggtgtggcaggactgctgtgaagactgtaggaccagggggcagttcaatgccttttcctatcatttccgangcagacggtctcttgagttcagctaccaggaggacaagccgaccaagaaaacaagaccacggaaaatacccagtgttgggagacagggggaacatctcancaacagcacctcagccttcagcacacgctcagatgcatctgggacaaatgacttcagagagtnttgttctggaaatgcagaagaccatcacagacctcanaacacagatnaagaaacttgaatcacggntcagtaccacanaattgcctggatgccngggggcgnaatcttcacncccaacaacaccaagtgggaaaaaaagatgcatgcacccatttttgaatgcaaa

SEQ ID NO: 1065 - DNA, 517 bp, Homo sapiens
  misc_feature 428, 430, 436, 453, 454, 472, 496: n = A,T,C or G
aaagagatgggggtcttactatgttggctaagctggtctcaaactccttgcctcaggtaatccttctgcctcagcctcccaaagtgctgagattacaggcatgagccaccatgcccgacttccctttgtgtaaaatgagataatatgtatgtcacagaattgttttaaggatgataaaggactaagtgagataatgtaggtgaagtttagtatgatgcctggctcatagttaagtgctgaattatgatagtaatcaatatctactcctaacctctttcttcacagattttaagcttctgtctttctagggggttaagagtcataaaccaaaattacactttcctctgctaggtttcctccctttcctcttcttgacagtctgatgggaaacaaaggcacacataagaacctagttccaagtagtcaanancctganaggaagggatatggagnngaatccttcatatctccnggagtgcctgtgaaaaaaacttangaatgggacttgggaaagcac

SEQ ID NO: 1066 - DNA, 343 bp, Homo sapiens
  misc_feature 298, 305, 324, 332, 336: n = A,T,C or G
ccatgtgtgcgcccagtgaaaagtttctgaacatgggtgcacccctgggagtgggcctgggtctcgtctttgtgtcctcattgggatctatgtttcttccacctaccaccgtggctggtgccactctttactcagtggcaatgtacggtggattagttcttttcagcatgttccttctgtatgatacccagaaagtaatcaagcgtgcagaagtatcaccaatgtatggagttcaaaaatatgatcccattaactcgatgctgagtatctacatggatacattaaatatatttatgcnagttgcnactatgctggcaactgggngcaacagnaaanaaatgaa

SEQ ID NO: 1067 - DNA, 515 bp, Homo sapiens
  misc_feature 436, 465, 484: n = A,T,C or G
ccactcacgctgggggaccttcagcaacctctgggaacacaaccaagcaatcatcaagcacctcctcgaaaactccacggccagcgtgagcgaggcagagagaaaggcgcaagtatactaccgtgcgtgcatgaacgagaccaggatcgaggagctcagggccaaacctctaatggagttgattgagaggctcgggggctggaacatcacaggtccctgggccaaggacaacttccaggacaccctgcaggtggtcaccgcccactaccgcacctcacccttcttctctgtctatgtcagtgccgattccaagaactccaacagcaacgtgatccaggtggaccagtctggcctgggcttgccctcgagagactattacctgaacaaaactgaaaacgagaaggtgctgaccggatatctgaactacatggtccanctggggaagctgctgggcggcgggggacnaggaagccatccggcccanatcagcaaatcttggactttgaacggactgg

SEQ ID NO: 1068 - DNA, 353 bp, Homo sapiens
  misc_feature 263, 336: n = A,T,C or G
ccattcttttatcttgggtccatgtgagtgacagaaatggtgcggcctgggaaagatctccctcctttacattttctcttctccctcctcctccttattctaaaactgtgcctccaacagaggggcaggggctcttgtagagagatccctggcccaggacaggagatgccaaatctaatttatctcactgagggcctttgagaaaaacgcttcagggccaggctcagtggctcatgcctatataatcccagtactttgagaanctgaggcggcagatcacttgaggccaggagttcgagaccagtctcgtcaacatggcgaaaccctgtctctacnaaaaaaaaaaaaaaatt

SEQ ID NO: 1069 - DNA, 512 bp, Homo sapiens
  misc_feature 318, 328, 347, 398, 400, 411, 423, 425, 429, 439, 443, 445,458, 460, 478, 481, 498, 500, 502: n = A,T,C or G
cctgtgggggctgcaggggaggaggatgtaccttgtgtctctttcaagtgccttaatccgagccagcagggccttctgcttgcctgctgccatactgtatgtaggaaagtgttctgtggctgctttgtgtcaagaaaagagcagtcactctcagaatcttgattccccatcagccaaagcaaaagatggctgctgctttgtaggcatgtgcctgcaagtgggaccttgctgggcattatatgccctgtgggggtttcagagaccctgaaagaggagggaggacccgcctccttgtctgcacaactgcatgcacttctntccccatcgntccacaacctgaaaccganaaggagttgctgaccattgcccaccccggtatccgggaggaacacaggcancncctttcccttnactggtctgcananacanggtgagctgncacntnccctctccaccangnacccttgttttggtggtnagnggcacttttccttttangntntatgggaggg

SEQ ID NO: 1070 - DNA, 108 bp, Homo sapiens
  misc_feature 75: n = A,T,C or G
aaaaactgctttagtttcatcttgaaatatatatacgtgtatatatatatttgctctagaatgatcatattgcancatgattctcatgcatttcaaagtactttattt

SEQ ID NO: 1071 - DNA, 507 bp, Homo sapiens
  misc_feature 460, 468, 507: n = A,T,C or G
ccatctggttatgagctgtggaaatatagtttttgtagatcttattgaacatctgttgtcagagttgtccaaaaatgattctatgtcaacaacaagaacctacatacaatgtattgctgctattagtaggcaagctggtcatagaataggtgaataccttgagaagataattcctttggtggtaaaattttgcaatgtagatgatgatgaattaagagagtactgtattcaagcctttgaatcatttgtaagaagatgtcctaaggaagtatatcctcatgtttctaccattataaatatttgtcttaaatatcttacctatgatccaaattataattacgatgatgaagatgaagatgaaaatgcaatggatgcttgatggtggtgatgatgatgatcaagggagtgatgatgaatacagtgatgatgatgacatgaagttggaaagtgagacgtgcanctgcgaantgcttggatgctgtagttagcacaaggcatgaaatgctn

SEQ ID NO: 1072 - DNA, 377 bp, Homo sapiens
  misc_feature 331, 352: n = A,T,C or G
ccttaacacacacacctctgctgttccgcagactgcagtgaaacaattccagggcatgcccccttgcacatacacaatgccaagtcagtttcttccacaacaggccacttactttcccccgtcaccaccaagctcagagcctggaagcccagatagacaagcagagatgctccagaatttaaccccacctccatcctatgctgctacaattgcttctaaactggcaattcacaatccaaatttacccaccaccctgccagttaactcacaaaacatccaacctgtcagatacaatagaaggagtaaccccgatttggagaaacgacgcatncactactgcgattaccctggntgcacaaaagtttataccaagtctt

SEQ ID NO: 1073 - DNA, 359 bp, Homo sapiens
  misc_feature 339, 350: n = A,T,C or G
aaaggctaccacgagacggggtggaaatgccaaaaatggcacctcatctctgatcaaagattcagagcatgcaagtgttgatgccatgaagagtcccagccttctccccactaaaataccaggcaacgcttagcagctgctgtcctaacaggctactttctgcaactgctgacgcaggttagttcatgtggttaaaggtcagaacgctggccccttacagagctgaagtgctcccacactcatcactggctctggagggaaaagaccactagctgtaacttctacaaaactttttttcacaaaatgtaaaacaataacaaaacctacctgccagggtgntaatgccgtancgtgacttt

SEQ ID NO: 1074 - DNA, 473 bp, Homo sapiens
  misc_feature 194, 259, 289, 361, 382, 408, 411, 429, 432, 436, 448, 451,454, 465: n = A,T,C or G
ccacaaatggcgtggtccatgtcatcaccaatgttctgcagcctccagccaacagacctcaggaaagaggggatgaacttgcagactctgcgcttgagatcttcaaacaagcatcagcgttttccagggcttcccagaggtctgtgcgactagcccctgtctatcaaaagttattagagaggatgaagcattancttgaagcactacaggaggaatgcaccacggcagctctccgccaatttctctcagatttccacanagactgtttgaatgttttcaaaaccaagtntcacactttaatgtacatgggcccgcaccataatgagatgtgagccttgtgcatgtgggggaggagggaganagatgtactttttacctcggnccgtaccacgcttaaggccgaaattncancaccactggcggccgttnacntaantgggatcccganttnggntaccaaatttnggggtaaa

SEQ ID NO: 1075 - DNA, 427 bp, Homo sapiens
  misc_feature 270, 322, 334, 365, 370, 386, 396, 420, 422: n = A,T,C or G
cctccttcggccttctttctcttctgctctgagtatcgcccaaaaatcaaaggagaacatcctggcctgtccattggtgatgttgcgaagaaactgggagagatgtggaataacactgctgcagatgacaagcagccttatgaaaagaaggctgcgaagctgaaggaaaaatacgaaaaggatattgctgcatatcgagctaaaggaaagcctgatgcagcaaaaaagggagttgtcaaggctgaaaaaagcaagaaaaagaaggaagangaggaagatgaggaagatgaagaggatgaggaggaggaggaagatgaagaanatgaagatgaanaagaagatgatgatgatgaataacctggttntagcncagtttttttttcttntctataaagnatttaacccccctgtacacaactnantcctt

SEQ ID NO: 1076 - DNA, 433 bp, Homo sapiens
  misc_feature 318, 325, 388, 390, 399: n = A,T,C or G
ccacccagtactttgctgacagggacatgttctgtgctggccgagtacctgaggaggatctgaagaggacaatgatggcctgtggaggctcaatccagaccagtgtgaatgctctgtcagcagatgtgctgggtcgatgccaggtgtttgaagagacccagattggaggcgagaggtacaatttttttactggctgccccaaggccaagacatgcaccttcattctccgtggcggcgccgagcagtttatggaggagacagagcggtccctgcatgatgccatcatgatcgtcaggagggccatcaagaatgattcantggtggntggtggcggggccattgagatggaactctccaagtaccttgcgggattactcaaggactattncnaggaaaacngcacttgtttattggggcatatgccaaggacctc

SEQ ID NO: 1077 - DNA, 534 bp, Homo sapiens
  misc_feature 460, 489, 500, 503, 511, 519, 531, 533: n = A,T,C or G
aaaccaaattctgagagtagccaacttctattttcagcagctggcaagagcaccctcaatgagttctactgacatttctattttcttcatcccatatggcataaaacaaaaccaatctagactccttgataagctttatgtggtcatttgagttttacaaatggtttctctaatggtatgccaaaatcatttatgtgttctctccagatagctttactgtaacatacagcaatgtttatcctggtgagtgagtcttctgtaaacagtcaaccaatgctctatgttatggaaaccaagctatatgcaattgaaacaatccacaggttctaacctggaaatactagggaaaacaatctggatgcattaatcacagcaatatgaagatctaccctataaaaaatgatgtgaatggctaccctaaatacaagttttacttttcttgaacctataggacctcggncgggaccacgctaagggcgaattccagcncactggggggncgngtactagngggatccnagctcggtaccnanc

SEQ ID NO: 1078 - DNA, 537 bp, Homo sapiens
  misc_feature 394, 473, 530: n = A,T,C or G
ccacagaagttgctgctgacgctctgggtgaagaatggaagggttatgtggtccgaatcagtggtgggaacgacaaacaaggtttccccatgaagcagggtgtcttgacccatggccgtgtccgcctgctactgagtaaggggcattcctgttacagaccaaggagaactggagaaagaaagagaaaatcagttcgtggttgcattgtggatgcaaatctgagcgttctcaacttggttattgtaaaaaaaggagagaaggatattcctggactgactgatactacagtgcctcgccgcctgggccccaaaagagctagcagaatccgcaaacttttcaatctctctaaagaagatgatgtccgccagtatgtttgtaagaaagcccttaaatnaagaaggtaagaaacctaggaccaaagcacccaagattcagcgtcttgttactccacgtgtcctgcaacacaaacgggnggcgtattgctctgaagaagcagcgtacccaagaaaaaataaagaagaagcttgcanaatattc

SEQ ID NO: 1079 - DNA, 246 bp, Homo sapiens; identical to SEQ ID NO: 806

SEQ ID NO: 1080 - DNA, 220 bp, Homo sapiens
  misc_feature 203: n = A,T,C or G
cctgctccaccactgactcaccgaatgaccttgggcaaggcactgccctctctgtgccttggtttccccatctgtagaatggggagggtggacactggaaactagatgacttctttcacctccaaaattcccttagtttctatgaaaatattgggggtaggggggtggattaggagattgaagggttgagaacaaagagaaantgcccaaagagtcctca

SEQ ID NO: 1081 - DNA, 253 bp, Homo sapiens
  misc_feature 197, 211, 213, 220, 223, 229, 244: n = A,T,C or G
aaatcatttatctggatttttatgttttattagcattttcaagaagacggattatctagagaataatcatatatatgcatacgtaaaaatggaccacagtgacttatttgtagttgttagttgccctgctacctagtttgttagtgcatttgagcacacatttttaattttcctctaattaaaaatgtgcagtattnttcagtggtcaaananattttanctnttttanaaaaaatgatgtccncctttatgg

SEQ ID NO: 1082 - DNA, 223 bp, Homo sapiens
ccaggcattgtccacaggaagagacatccagggcacacccatgcggggacaggcgcgccttgtggggccaggcacacagaaggggggagcatggagcagccccggggtcctaaccctccctgtgattttatgatacgtatacattgggctctgtccacggctcctggctcatgactcccacagcccttgttacggtcttgttctaacgatgggaagctttagg

SEQ ID NO: 1083 - DNA, 534 bp, Homo sapiens
  misc_feature 381, 431, 433, 456, 461, 468, 483, 506, 514, 521, 522: n = A,T,C or G
cctatgtgcgccagtttcaggtcatcgacaaccagaacctcctcttcgagctctcctacaagctggaggcaaacagtcagtgagagtggaggctccagtcagacccgccagatccttgggcacctggcactcaagcactttgcacgatgtctcaaccaacatctgacatctttcccgtggagcaacttcctgctccacgggaaagaggtcgatggatttacccctggacccataagtctgttcatcctgctgaagtcccctccccattgctccttcaagccaaaactacactttgctggttcctgtcccctctgagaaaggggatagaaagctccttcctctatgtcctcccatcgagatctgttctggggatggagcttncaacttcctcttcagcaggaaagagtgctgctcacccttctgttttgcanantgggatgtgggagggattggcanccttnttctccnccacctgtcagcttntttcctggtcagggctgggaccnccaggaanattatgnntgccgtgtgggg

SEQ ID NO: 1084 - DNA, 199 bp, Homo sapiens; identical to SEQ ID NO: 1033

SEQ ID NO: 1085 - DNA, 469 bp, Homo sapiens
  misc_feature 372, 381, 383, 396, 414, 417, 451, 454: n = A,T,C or G
cctgggtcttgagagcctgtcaccggagttttttacctcagtggtgcagggtgtgctcagctccctgctgggctccctgggggctcgggctggcagcagtgaaagtattgctgccttcatacaacgcctcagtggatccagcaacatctttgagcctggagctgatggggcccttggattctttggggccttgctttctcttctgtgccagaacttctctatggtggacgtagtgatgcttctccatgggcatttccagccactacaacggctccagccccagctgcgatccttcttccaccagcactacctgggtggtcaggagcccacacccagtaacatccggatggcaacccacacattgatcacggnggctagaanantatgtgccgggangagtttttccttggtgcnggntcagccagggggtggacatcatccggacaaaccntgnaatttctccaaaaca

SEQ ID NO: 1086 - DNA, 199 bp, Homo sapiens
  misc_feature 113, 127, 149: n = A,T,C or G
aaagatgctgttaatgaacattacggacaattcatggtgtggctagttggtaacacttcagctgatttttcttatgagatggaaaaaaaaaatcagccaagtaagggcacatnttcagttcatttanaagtcagcatccaaggtaaaanaattctctgttggacttgacatcactcccatcctctgatactcgcctact

SEQ ID NO: 1087 - DNA, 323 bp, Homo sapiens
  misc_feature 212, 283, 292: n = A,T,C or G
cacctctcggatcagggcctctgacaccgcgtttgaagcatagcgttgcttgctgttcaccttgatcacggggcccttgtggaataaaggccggtggttctcctcatgcttgtccaggtagttgggatgcacagcatgggccatgtctgcgctgatcatgaaggacttgggtatggcttcctcgaaggctgtcgggtgctggcacgaggctnagatccgccgcagcaccagctctgtcagcagtgactgtgctccctgtgcactctcggaccccacctcttcnttgtcatanagtgtgaccatgcgcacgtgaggctctgtgg

SEQ ID NO: 1088 - DNA, 414 bp, Homo sapiens
  misc_feature 109, 315, 317, 333, 339, 341, 346, 379, 388, 391, 392, 407,410: n = A,T,C or G
ccatggcaggaggtggggcagatgggtgtcggcagatttagtgtttggcaaccagtggggctgggggtgggatctgggagggagccgaggggcctggggaagggaaaanatcttggaccctgccccggcccataggacactcaaaaacactttataaaaattggggccacagagtagaagaaaaacgagtcatcagaatcaaaaactaaagagtggaaagatttttttttcttgtctaaaaggcaaaaaactacaaacagcccaagtcctgagctccccaagacctggatcctccactgtccccctgaaacccgnangaagcgggatggggancacaanangtggntttttaaaaaaatcacccctggatgggaaactntttattttntgnngccttcctctgcctnccnctct

SEQ ID NO: 1089 - DNA, 378 bp, Homo sapiens
gcgatttccttgttgcctaccctgtccatagtgcctggcacataggcactgaaacactgcatgttaatccacaccccaccccacctatgagtgtagtcaaagctggtaagtgacaagggctttcgtggaaacttggcctgacctaatgttgggcatcaggttacccaaagagcttcagggaaatgagaaaggacttgcaggtcttgatgagaatggaggggtaactgccaatgagggctttggctttagcgaaagtctgaaagggaagccataggaacttaaacgtaccgactataaagctctgagaaaagctgatgttttagaaagaccatacattctaggtacaaatacctaaaaactaaaaaataagtacgttgg

SEQ ID NO: 1090 - DNA, 426 bp, Homo sapiens
  misc_feature 303, 362, 374, 380, 389, 392, 418: n = A,T,C or G
cctccgagtgcccagttactgaggcagctggggaaaaatgttgagtaaacatgattctacaattacggagataaaaaataaaaacagcatggactggttctaccctagaatcaaactacaacaaaatccaaagtgttcattcatgtagattcaaaatgacttcattctgtcataaattataaaatacaaaggtggctgttttaatgacaaaactcaaaacagtactaaaaggggtttgtgtcaatggacaaaagtcagtccctctaggtagggccccaaggagcatcacccaggttgaagggnggttttcctactgctgggccagaagtgctgtcctattggccttcatcttctccagcctnttggaccttggncgcgancacgcttanggngaattccagcacactggtgggcggtnctagtggt

SEQ ID NO: 1091 - DNA, 320 bp, Homo sapiens
  misc_feature 137, 194, 262, 276, 285, 303, 316: n = A,T,C or G
ccagcctgcaagactgcttcctgcagcagagtgagccactggctgccacaggcacaggggactttaaccggcagttcttgggtcaaatgacacaattaaaccaactcctgggagaggtgaaggaccttctgagacancaggttaaggaaacatcatttttgcgaaacaccatagctgaatgccaggcttgcggncctctcaagtttcagtctccgaccccaagcacggtggtgcccccggctccccctgcaccgtcaacacncccacctcgtcggngtgactccnacccatgtttccgaggtngccaatgtacccnacag

SEQ ID NO: 1092 - DNA, 522 bp, Homo sapiens
  misc_feature 245, 256, 259, 270, 279, 303, 309, 310, 313, 330, 353, 370,386, 400, 415, 443, 451, 454, 459, 478, 487, 488, 493, 502,515: n = A,T,C or G
aaagcctttttttaggccacattgacagtggtgggcggggagaagatagggaacactcatccctggtcgtctatcccagtgtgtgtttaacattcacagcccagaaccacagatgtgtctgggagagcctggcaaggcattcctcatcaccatcgtgtttgcaaaggttaaaacaaaaacaaaaaaccacaaaaataaaaaacaaaaaaaacaaaaaacccaagaaaaaaaaaaaaagtcagccnttggcttctgnttnaaatcctcaanaggggaagnaactccgtgtgcctggggttcccnaggganntgntggctgacctgggcccncaaaacctggctttggtccccancattgatttttgggggnggcgtttgtaggcttnggggtctggctttntggacccttcggccncaaccccccttaagggcgaaatttccancacacttnggnggccngtttcttaaggggatcccnacctcggtnnccaanctttggcgnaaaacattgggcnataacct

SEQ ID NO: 1093 - DNA, 473 bp, Homo sapiens
  misc_feature 309, 431, 468: n = A,T,C or G
aaaaactcatcaaatgtgaatcatggcggggaagaccactgagctgatttctgataactaagttatcactgaacataatttatcatatatggctactggcatcatgaagaccttgggatagggaagactctttatgagaaatataaacatcacttgtgtaggaatcaccaggtgtccctagagcagttttgtactaaagacttctagtgtttactccctcaccacggtactccagcccaagagccaagagcacaatggtcaaactcactgaaggtttttacaacaggaaaccagtggaggtattgtgangtactacaactttgaggcacaatctaaatactaaaaatgattatgaaatcttgagttgagctgattgatgccctcttaaatccattaataatccatgaaagtgatttccatgcctaccctgntttctttctaactgacagctggggagtattaaatganataaa

SEQ ID NO: 1094 - DNA, 453 bp, Homo sapiens
  misc_feature 341, 394, 419, 431, 441, 443: n = A,T,C or G
aaacttccctctgtggaagatattcaaaagccacaagtggtgcaaatgtttatggtttttatttttcaatttttattttggttttcttacaaaggttgacattttccataacaggtgtaagagtgttgaaaaaaaatttcaaatttttgggggagcgagggaaggagttaatgaaactgtattgcacaatgctctgatcaatccttctttttctcttttgcccacaatttaagcaagtagatgtgcagaagaaatggaaggattcagctttcagttaaaaaagaagaagaagaaatggcaaagagaaagttttttcaaatttctttcttttttaatttaanattgagttcatttatttgaaacagactgggcccaatgtcccacaaaaaaattnccttggtcaagccacccacccgatngtcccaaagggngccaattttncnaggaaagggg

SEQ ID NO: 1095 - DNA, 414 bp, Homo sapiens
  misc_feature 409: n = A,T,C or G
ccagcagtcctcctgacatggactatgaccctgaggcacgaattctctgtgcgctgtatgttgttgtctctatcctgctggagctggctgtgcagagaggcatgctgagccaaatgttgtctgccatcctgttgttgcttcagctgtgggacagcggggcacaggagactgacaatgagcgttccgcccagggcaccagcgccccacttttgcccttgctgcaaaggttccagagcatcatttgcaggaaggatgcaccccactccgagggcgacatgcacgtgagtgtcatgatggaactttgtgtttaggtggcactcgagtctagttattttttacgcaagaccagcgtgcttgtgcacggcagtgtttttctctggtgtgtgtgtgtttggggataacagcagcnagtca

SEQ ID NO: 1096 - DNA, 546 bp, Homo sapiens
  misc_feature 454, 457, 458, 475, 505, 545: n = A,T,C or G
ccaaggacgtggcgtccctcagttcccagctccaggacacccaggagctgcttcaagaagaaacccggcagaagctcaacgtgtctacgaagctgcgccagctggaggaggagcggaacagcctgcaagaccagctggacgaggagatggaggccaagcagaacctggagcgccacatctccactctcaacatccagctctccgactcgaagaagaagctgcaggactttgccagcaccgtggaagctctggaagaggggaagaagaggttccagaaggagatcgagaacctcacccagcagtacgaggagaagcggccgcttatgataaactggaaaagaccaagaacaggcttcagcaggagctggacgacctggttgttgatttggacaaccagcggcaactcgtgtccaacctggaaaagaagcagaaggaaatttgatcagtttgttanccnnagagaaaaaacatcttnttccaaatacccggatgaaaagggacaganctgaagcaaaagcccagggagaaggaaaccaaggcctttnt

SEQ ID NO: 1097 - DNA, 543 bp, Homo sapiens
  misc_feature 431, 432, 466, 472, 494, 502, 512, 534: n = A,T,C or G
ctcagcagcaagggttcgggctctgcaggctgggacgtcattcagatgacaccacaggagattgccgtgaacctccggcccggtgacaagaccaccttccagctacaggttcgccaggtggaggactatcctgtggacctgtactacctgatggacctctccctgtccatgaaggatgacttggacaatatccggagcctgggcaccaaactcgcggaggagatgaggaagctcaccagcaacttccggttgggatttaggtcttttgttgataaggacatctctcctttctcctacacggcaccgaggtaccagaccaatccgtgcattggttacaagttgtttccaaattgcgtcccctcctttgggttccgcatctgctgcctctcacagacagagtggacagcttcaatgaggaagttcggaaacannaggggtgtcccggaacccgaagatgccccctgangggggntttgatgccagtactccaggcnccgtttcnaaggagaaanattggctggcgaaaaggatgcncttgctttt

SEQ ID NO: 1098 - DNA, 470 bp, Homo sapiens
  misc_feature 275, 300, 350, 351, 359, 360, 399, 403, 414, 415, 422, 426,429, 446, 464: n = A,T,C or G
ccacccttctgcccaggggctgaccctcgggccccatccccagcagcccaaaggctgtgttgaagaggttgatgggagtggagccatcggtgatgagggttgatttcaggcccagggactggagcagttttacctgcatctcaggcccagccacagcaaggtccctgatggtgctggggcctatggcctctgtcatctgcttgaacttcttcacctccacctcagccagctgctgagccttgctcacctccagctccagctgggcccgggcatanaccaagttccagctctcggaccttntggaacccttttggagctcagccttccgtttcaatggaccttcgggcccnngaaccacnncttaaaggggccgaaatttccaacaacacttgggcgggnccgnttaaccttaannggggatncccnaancctcgggtaccccaaanctttgggggggtaaaatnaatggg

SEQ ID NO: 1099 - DNA, 409 bp, Homo sapiens
  misc_feature 272, 303, 311, 347, 370, 386, 387: n = A,T,C or G
ccagtcctacaaccagtattctcagagataccatcagagaacaaacactaatgttaattgcccaattgagtgcttcatgcctttagatgtacaggctgacagagaagattcccgagagtaaatcatctttccaatccagaggaacaagcatgtctctctgccaagatccatctaaactggagtgatgttagcagacccagcttagagttcttctttctttcttaagccctttgctctggaggaagttctccagcttcagctcaactcacagnttctccaacatcaccctgggagtttcctganggtttttntcataaatgagggctggacattgcctgttctgcttngaagtattcaataccgctcaggnattttacctcgggccnntgaccacgcttaagggcgaatt

SEQ ID NO: 1100 - DNA, 313 bp, Homo sapiens
  misc_feature 57, 62, 83, 88, 102, 106, 148, 150, 171, 174, 176, 186, 205,221, 233, 247, 250, 259, 281, 297, 300: n = A,T,C or G
aaactgtaactcaggaaagagatttctatctgcgattctgatttttttttttgaacnctggngatggttcatgcaaaaaattnctatncaaggagcaaaatntaanactgctgtttttcccaataaattcaattgttttccacaatgnanaattttaatcttcaaattaantgnanctaggacagngagtgaaactaatcactgnttgacttttattttcntctaggaaaaanaacatttgatgtcnccncattaaaangccttcctgcttaatatcaganaaaaaaatccatgttnccngtttaaactcagc

SEQ ID NO: 1101 - DNA, 306 bp, Homo sapiens
ccaatgccaaggagatcgctcggactgtgcagatcctgggtgcagacttcatcctgtctctaggggacaatttttacttcactggtgtgcaagacatcaatgacaagaggttccaggagacctttgaggacgtattctctgaccgctcccttcgcaaagtgccctggtacgtgctagccggaaaccatgaccaccttggcaatgtctctgcccagattgcatactctaagatctccaagcgctggaacttccccagccctttctaccgcctgcacttcaagatcccacagaccaatgtgtctgtgg

SEQ ID NO: 1102 - DNA, 267 bp, Homo sapiens
cctagacaatgcagggcccttgttcacacacacccaagcccctccaaactcaggcagccttggaaaggagaagtgtgaggcaggtgtgggtaggacctctttttagtacctagaaaaaggctaagaaagtggcctggagatgtttagaaggttaaaaccaacgaagaagaaaatcaatgacaacctatcaggaactgattgactctcagaatggagaactggacacagaaactggatcatgctagaaaattccagggaacccacagg

SEQ ID NO: 1103 - DNA, 450 bp, Homo sapiens
  misc_feature 444, 446: n = A,T,C or G
ccattcagacccggggtggcccagaaaagcatgaagtaactggctgggtgctggtatctcctctaagtaaggaagatgctggagaatatgagtgccatgcatccaattcccaaggacaggcttcagcatcagcaaaaattacagtggttgatgccttacatgaaataccagtgaaaaaaggtgaaggtgccgagctataaacctccagaatattattagtctgcatggttaaaagtagtcatggataactacattacctgttcttgcctaataagtttcttttaatccaatccactaacactttagttatattcactggttttacacagagaaatacaaaataaagatcacacatcaagactatctacaaaaatttattatatatttacagaagaaaagcatgcatatcattaaacaaataaaatactttttatcgcaaaaaanangcgg

SEQ ID NO: 1104 - DNA, 543 bp, Homo sapiens
  misc_feature 424, 457, 472, 473, 476, 482, 494, 506, 538: n = A,T,C or G
aaaaaaattggatgtctttctgagggtctgagaagaatagggcagaagaggaaagggtcactttaggggtctggcttaacccactgcctagatctccaactgaagagctcctttcccatcctcaggggaagagtgcctgttttcaaacggcatccctactacacatataccccccttccctaaaatcttgatgtggcaaacacacccaagaacccacaggaatatgtccttataaatatgtttgtatcagagaaaacaaggcactttgggagcattatggcttactctactacatgtacatcattctagacagaaagtaaaaactggttagttcctcaagtgaattaactgaataaacttaatacaataacaaaattgttccctaacccacactgaggcacagttaaagggaacatggtaggangcacagaaggaggcacagaatgaggcacatctntgcgcgacacctggnnccnggtcantttggaccccancagggctcaaanccttgatgcctccaggaaacctgacatttctnatgac

SEQ ID NO: 1105 - DNA, 381 bp, Homo sapiens
ccaaggacttccctgagtacacctttgccattgcggacgaagaggactatgctggggaggtgaaggacctggggctcagcgagagtggggaggatgtcaatgccgccatcctggacgagagtgggaagaagttcgccatggagccagaggagtttgactctgacaccctccgcgagtttgtcactgctttcaaaaaaggaaaactgaagccagtcatcaaatcccagccagtgcccaagaacaacaagggacccgtcaaggtcgtggtgggaaagacctttgactccattgtgatggaccccaagaaggacgtcctcatcgagttctacgcgccatggtgcgggcactgcaagcagctagagcccgtgtacaacagcctgg

SEQ ID NO: 1106 - DNA, 538 bp, Homo sapiens
  misc_feature 267, 374, 386, 431, 449, 451, 461, 497: n = A,T,C or G
cctgggcctcgcaggcttaaggagcacttgttggcactgttagctcagcacctctcccagctccagcccatcggctggagaggaaaagggcagaaaacacaaatctcactctagaaacacatacacacacctactacacagatgataaaatcccacaatcgtatctgttcatgtttctgggttttgcactgaacagagattggaagggagtaaggactctctcccttctgcttaacattcacatcaggaaaaagaagaaaacaaagntgccctttcatcttcatctgcttatttcagaggacacacggaggcagactgaccgagcagtggggcttcatcttcattcttgcacttctcaccctacaaccgtttancaacagaaaccntggaaagcgctggctacggggctccaggcagccccccccttattnggcaaaggagttaaaaanancatcaccacnacctcctactggtttttggcttgcttgagggaaaanttcccccggagccggccttgggcgtggccccagccctactg

SEQ ID NO: 1107 - DNA, 537 bp, Homo sapiens
  misc_feature 449, 465: n = A,T,C or G
ccacctaactgctgatgtacaagtcttccccaggccagaaccttttgttgtagatgaagaaattgatcctatccctaaagtcattaacacagatttggaaatagtgggatttattgatatagctgatatttcaagtcccccagttctgtccagacatctggtcttacctatagcacttaacaaagaaggtgatgaggtgggtactggcatcactgatgacaatgaagatgaaaattcagccaatcagattgcaggcaaaatacccaacttttgtgtcctgctccatggtagcctaaaagtggaaggaatggtagcgattgttcaattaggtcctgaatggcatggaatgctctactcccaagctgacagcaagaagaaatcaaacctcatgatgtctctctttgagcctggcccagaacctctcccatggctaggggaaaatggcacanttgggtcctatttcanatgctaaagaaaacccttatggcgaggatgacaataagagtccattcccctgcgcccaaaacaaacgcagtt

SEQ ID NO: 1108 - DNA, 539 bp, Homo sapiens
  misc_feature 454, 457, 473, 483, 509, 534: n = A,T,C or G
aaaaatctacctgttcctgacttaaaacaaaaggaaagaaactacctttttataatgcacaactgttgatggtaggctgtatagtttttagtctgtgtagttaatttaatttgcagtttgtgcggcagattgctctgccaagatacttgaacactgtgttttattgtggtaattatgttttgtgattcaaacttctgtgtactgggtgatgcacccattgtgattgtggaagatagaattcaatttgaactcaggttgtttatgaggggaaaaaaacagttgcatagagtatagctctgtagtggaatatgtcttctgtataactaggctgttaacctatgattgtaaagtagctgtaagaatttcccagtgaaataaaaaaaaattttaagtgttctcgggggatgcatagattcatcattttctccaccttaaaaatgcgggcatttaagtntgnccattatctatatagncctggcttgnctattggatatataatctatatgaanaaagaaaattgcttaatcagaccancttta

SEQ ID NO: 1109 - DNA, 373 bp, Homo sapiens
ccttgcctgtgaagctcattgggatgaattgcactctaatgaagcaatacattgagtttgtggcagacagacttatgctggaactgggttttagcaaggttttcagagtagagaacccatttgactttatggagaatatttcactggaaggaaagactaacttctttgagaagagagtaggcgagtatcagaggatgggagtgatgtcaagtccaacagagaattcttttaccttggatgctgacttctaaatgaactgaagatgtgcccttacttggctgatttttttttccatctcataagaaaaatcagctgaagtgttaccaactagccacaccatgaattgtccgtaatgttcattaacagcatcttt

SEQ ID NO: 1110 - DNA, 201 bp, Homo sapiens
cctatgaggcaggtctgattggcaagaatgcttgtggctctggctatgattttgacgtgtttgtggtgcgcggggctggggcctacatctgtggagaggagacagcgctcatcgagtccattgagggcaagcagggcaagccccgcctgaagccccccttccccgcagacgtgggagtgtttggctgccccacaactgtgg

SEQ ID NO: 1111 - DNA, 223 bp, Homo sapiens
ccagctccacgtgaccagggagaggaaaagcccggccctcctggaggtgaagaccgagaagctggcctctccgcacctgtgaagacccactggtcagttgcaagtgcgacagtgtgtgcactcagtgcagacactgcagcacctcagcacctccctaccggggtggaaagagcactttttctttacagaaacatgattcttagatagcgagcctccccttttt

SEQ ID NO: 1112 - DNA, 326 bp, Homo sapiens; identical to SEQ ID NO: 887

SEQ ID NO: 1113 - DNA, 324 bp, Homo sapiens
  misc_feature 255, 284, 291, 307, 314, 319: n = A,T,C or G
ccacccacgcttaggttcccatcacactgatgactccgggtttggcgagcacaggagcgcaaaccttttcacattctttctgtgatccaaatttgttttcgtttccaccacaacctccataccagaatcttgcacagcttttggtgtttggatcatagtaccattttaatatgaaatccctgcaagttccttcgtctttcggcaacttgcatatatctgtttcagtgagagccaatggtcttgggtcaccctttnaatgatgggtgaactaaaaactgaccttnttggttntgaagggggggggttnaaaattnttttntcttg

SEQ ID NO: 1114 - DNA, 379 bp, Homo sapiens
  misc_feature 315, 318, 356, 363: n = A,T,C or G
gaagaaaacaggacacaagatggcaagcctgagagaattgcccagctgacctggaatgaggcctttgtcttctctgcttgtatctaggcagttgctgttttttcctttctcccgacccccatccttctttctgtttaggctttcatctgccctaaaccctggtttttagtttctgtctctggctgataagagggaaggaggggagggaagctgccccctagaatggcccgtctgcagcgtaatccttccttctttttttcttaaacaaaatcttggttttcgtcttaaaaatctggcttatatctcaaggtgcgnagnaattttttcctctttacttcctgtccatcctgattggnttaacancacttttttttttttt

SEQ ID NO: 1115 - DNA, 296 bp, Homo sapiens
  misc_feature 135, 173, 192, 215, 223, 260, 271, 282, 284, 287: n = A,T,C or G
ccagaaccttggagtgggccttcgtgctacaaggccatgtatgtaccccagtgctcccaaggctatgcccgccagcgccttagcaagtcagggcccacgggggccacagatggtaggatgggggggtgccaacangaacggagggacttggtgggcgggtgacttctcactgnttcccgcttatgtaagaancaaactctcaagctgtcactctnagcatctnccggggacaggcactaggctggtaactgggtaaagtnataaccccctnggccccatgtnanacnggaggacct

SEQ ID NO: 1116 - DNA, 226 bp, Homo sapiens
  misc_feature 203, 204: n = A,T,C or G
aaatagttgacactcaattttattgctaaaaaaaatgtcctctggagtgacagcaggtatttgtcctcagcctctccccagagtccctgggagtgtttctgttattgtggagggaataggggatctggggacagggtgggacgtaccatggggacaggaggtcacagaacacacacacacacacacacacacacacacacacnngtgcacacacacatccccccac

SEQ ID NO: 1117 - DNA, 312 bp, Homo sapiens
cctatgtcccagtgagtgacatgaacggcctgggatttaagccttttgacctggtcattccgtttgctgtcaggaaaggagaaatcactggagaggtccacatgccttctgggaagacagccacacctgagattgtggacaacaaggacggcacggtcactgttagatatgcccccactgaggtcgggctccatgagatgcacatcaaatacatgggcagccacatccctgagagcccactccagttctacgtgaactaccccaacagtggaagtgtttctgcatacggtccaggcctcgtgtatggagtgg

SEQ ID NO: 1118 - DNA, 516 bp, Homo sapiens
  misc_feature 341, 411, 434, 469, 470, 492, 496, 506, 509, 513: n = A,T,C or G
aaatcttgaaacaaatcaagaaaccttttgttaaccaaaccagaaaagttccagcttactgggagacttctcaaatttgtcatttttccatgaattcagtttgtgctgtttaagaccttcctggtccacgaattcagtttgtgctgtttaagacctggttatttcccatgagccacacatgcttccaatctttcttgaagtagtgcacatgttccttcccagagctagtttctatttgcccatctcagttaagtccatatacatagaattgcattcattgacaccattccgtactttataaatgtataccaacttcaccatcctcagggcaatgttacatncctcttccagaattaaacatttggagttgtctcccacacactcacacacacacaagccttggacacaacnatcaaaaggatcctaaagccaanatggcaccacgtgttccaacacgcactcttacagnntttcatgatgagggtcactaantgcncaggtgtggnaancggncca

SEQ ID NO: 1119 - DNA, 320 bp, Homo sapiens
aaaaacaaaataaatgaaattctagttttctgtgcttccagttggtagaagcagtagaagggaggagggaatttggcctttcggttcctccagggcagccttacaactgctgttggtggtgggcttgtactgaggtacgtgggccatgtggggtgggttggtatacgccggctggacgtgagagggatggatcgtaaagacagtctgttgtgctgctgggaaactattctgtggcgactgcgtgttggaggcaggtgtcatggagggtggagttggcgcaagccccgcgtggtaaatggctgactgctgctgtggactgg

SEQ ID NO: 1120 - DNA, 400 bp, Homo sapiens
ccagcatggggctgcagctgaacctcacctatgagaggaaggacaacacgacggtgacaaggcttctcaacatcaaccccaacaagacctcggccagcgggagctgcggcgcccacctggtgactctggagctgcacagcgagggcaccaccgtcctgctcttccagttcgggatgaatgcaagttctagccggtttttcctacaaggaattcagttgaatacaattcttcctgacgccagagaccctgcctttaaagctgccaacggctccctgcgagcgctgcaggccacagtcggcaattcctacaagtgcaacgcggaggagcacgtccgtgtcacgaaggcgttttcagtcaatatattcaaagtgtgggtccaggctttcaaggtggaaggtgg

SEQ ID NO: 1121 - DNA, 337 bp, Homo sapiens
aaaaggaaacactgtagatgtacaggaggtctccttaacccacttgaacctgtaatgtcatctggataaaagttctcttgaccaaagtaacattttatccaaaataatcatatcttagacccgtgtagcttgacatacttcaaaaatacgtgaaagtgtaactgcatcacagcaggtctgttaataccgaggtactacatacttctcaaagacataaatagtggaagctttaagtttgattctgatgttagcacttcaagtgaagaagccacagaactcaaccgtaatttgtctgtcacttaaaataactctgtgtttccactgatatacctgtttt

SEQ ID NO: 1122 - DNA, 345 bp, Homo sapiens
ccagtttgccctctcaggctcctgggatggaaccctgcgcctctgggatctcacaacgggcaccaccacgaggcgacttgtgggccataccaaggatgtgctgagtgtggccttctcctctgacaaccggcagattgtctctggatctcgagataaaaccatcaagctatggaataccctgggtgtgtgcaaatacactgtccaggatgagagccactcagagtgggtgtcttgtgtccgcttctcgcccaacagcagcaaccctatcatcgtctcctgtggctgggacaagctggtcaaggtatggaacctggctaactgcaagctgaagaccaaccacattgg

SEQ ID NO: 1123 - DNA, 433 bp, Homo sapiens
aaaccctattaaacaagatgtgaaaaaaggaaaacttcgctatgttgcgaatttgttcccgtataaaggatatatctggaactatggtgccatccctcagacttgggaagacccagggcacaatgataaacatactggctgttgtggtgacaatgacccaattgatgtgtgtgaaattggaagcaaggtatgtgcaagaggtgaaataattggcgtgaaagttctaggcatattggctatgattgacgaaggggaaaccgactggaaagtcattgccattaatgtggatgatcctgatgcagccaattataatgatatcaatgatgtcaaacggctgaaacctggctacttagaagctactgtggactggtttagaaggtataaggttcctgatggaaaaccagaaaatgagtttgcgtttaatgcagaattt

SEQ ID NO: 1124 - DNA, 572 bp, Homo sapiens
  misc_feature 268, 313, 355, 378, 414, 419, 432, 456, 458, 468, 478, 483,490, 505, 522, 526, 530, 537, 539, 540, 548, 561, 562, 567,571: n = A,T,C or G
ccacagcaggactacagtcaagacaatcacagtctctgcggagctgcccaagccctccatctccagcaacaactccaaacccgtggaggacaaggatgctgtggccttcacctgtgaacctgaggctcagaacacaacctacctgtggtgggtaaatggtcagagcctcccagtcagtcccaggctgcagctgtccaatggcaacaggaccctcactctattcaatgtcacaagaaatgacgcaagagcctatgtatgtggaatccanaactcagtgagtgcaaaccgcagtgacccagtcaccctggatgtnctctatggggccggacacccccatcatttcccccccagactngtcttacctttcgggagcgaacntcaacctcttctgccactctggcttctaacccatcncccgnagtatttcttggnggatcaatggggatacccgtagcnancacacacaantttctctttntctcncaaaatnacgccaaataattgncgggacctatgcctgtnttgntctntaaactngnntactggcngaaatattccttnnttaanagcnt

SEQ ID NO: 1125 - DNA, 224 bp, Homo sapiens
ccagcgggcccagcaatctccatgtgtacttattacagtcttatttaaccaggggtcctaaccactaacattgtgactttgctttgagacctttcctctcctgggtactgaggtgctatgaagccaactgacaaagatgcatcacgtgtcttaggctgatgccactacccgatttgtttatttgcaatttgagccatttacctgcccggcggccgctcgaaggg

SEQ ID NO: 1126 - DNA, 549 bp, Homo sapiens
  misc_feature 496, 524: n = A,T,C or G
ccacagaagttgctgctgacgctctgggtgaagaatggaagggttatgtggtccgaatcagtggtgggaacgacaaacaaggtttccccatgaagcagggtgtcttgacccatggccgtgtccgcctgctactgagtaaggggcattcctgttacagaccaaggagaactggagaaagaaagagaaaatcagttcgtggttgcattgtggatgcaaatctgagcgttctcaacttggttattgtaaaaaaaggagagaaggatattcctggactgactgatactacagtgcctcgccgcctgggccccaaaagagctagcagaatccgcaaacttttcaatctctctaaagaagatgatgtccgccagtatgttgtaagaaagcccttaaataaagaaggtaagaaacctaggaccaaagcacccaagattcagcgtctttgttactccacgtgtcctgcacacaaacgggggcgtattgctctgaagaagcagcngtaccaagaaaaataaagaagagctgcngaatatgctaaacttttggacctcc

SEQ ID NO: 1127 - DNA, 117 bp, Homo sapiens
cctagtatgaggagcgttatggagtggaagtgaaatcacatggctaggccggaggtcattaggagggctgagagggcccctgttaggggtcatgggctgggttttactatatgatag

SEQ ID NO: 1128 - DNA, 207 bp, Homo sapiens
gagaacttgttggagtgctggtgaatcatttcaagagtgagaagcgccaccttcaagtgaacgtcaccaacccagtacagtgcagcctgcacgggaagaagtgcaccgtctccgtggagatgcggctcaaccagccccagcccgacttcaccaagaatcgctcgggcttcatcctcagcgcgcccgggaactgacgccccgcggagg

SEQ ID NO: 1129 - DNA, 234 bp, Homo sapiens
ccaccagcaggaatgcagcggattcctctgtcccaagtgctcccagaaggcaggattctgaagaccactccagcgatatgttcaactatgaagaatactgcaccgccaacgcagtcactgggccttgccgtgcatccttcccacgctggtactttgacgtggagaggaactcctgcaataacttcatctatggaggctgccggggcaataagaacagctaccgctctgaggagg

SEQ ID NO: 1130 - DNA, 347 bp, Homo sapiens
ccagagggtgtgacccagttaccctttaacccccacccttccagtcgggtgtgagggcctgaccgggcccagggcaagcagatgtcgcaagccctatttattcagtcttcactataactcttagagttgagacgctaatgttcatgactcctggccttgggatgcccaagggatttctggctcaggctgtaaaagtagctgagccatcctgcccattcctggaggtcctacaggtgaaactgcaggagctcagcatagacccagctctctgggggatggtcacctggtgatttcaatgatggcatccaggaattagctgagccaacagaccatgtggacagctttgg

SEQ ID NO: 1131 - DNA, 546 bp, Homo sapiens
  misc_feature 457, 488: n = A,T,C or G
ccttcgagaagatccctagtgagactttgaaccgtatcctgggcgacccagaagccctgagagacctgctgaacaaccacatcttgaagtcagctatgtgtgctgaagccatcgttgcggggctgtctgtagagaccctggagggcacgacactggaggtgggctgcagcggggacatgctcactatcaacgggaaggcgatcatctccaataaagacatcctagccaccaacggggtgatccactacattgatgagctactcatcccagactcagccaagacactatttgaattggctgcagagtctgatgtgtccacagccattgaccttttcagacaagccggcctcggcaatcatctctctggaagtgagcggttgaccctcctggctcccctgaattctgtattcaaagatggaacccctccaattgatgcccatacaaaggaatttgcttnggaaccacataattaaagaccagctggcctntagtattctgtaccatggacagaccctggaaactctgggcgggaaaaaactgaaagtt

SEQ ID NO: 1132 - DNA, 169 bp, Homo sapiens; identical to SEQ ID NO: 832

SEQ ID NO: 1133 - DNA, 327 bp, Homo sapiens
ccaccgggatagccgggggtctggcaggaatgggaggcatccagaacgagaaggagaccatgcaaagcctgaacgaccgcctggcctcttacctggacagagtgaggagcctggagaccgagaaccggaggctggagagcaaaatccgggagcacttggagaagaagggaccccaggtcagagactggagccattacttcaagatcatcgaggacctgagggctcagatcttcgcaaatactgtggacaatgcccgcatcgttctgcagattgacaatgcccgtcttgctgctgataactttaaagtcaagtatgagacagagctgg

SEQ ID NO: 1134 - DNA, 378 bp, Homo sapiens
ccttgtagacactgaggaacatcagcaggaggacagctggccggagggtgtggtacagatcatagcgtgttatcatccagacctgagcagacgcgacgatgtaatggaccagactgatgttggagtctatgctcatctggatgtacttccagtcaaactcaatgccccgggctccgacccataggggaatgcagcgggacataataagctcagcagtggcccagcccagggcagcaaccatgatcttgtactctcccttgccggcattccgggacatgacaaggtttagacctatcaggtctgccacatccacgctggccttcatgaactccccaatgaagtcatagatgccgccttcccaggtgggaaagaaagtgg

SEQ ID NO: 1135 - DNA, 547 bp, Homo sapiens
  misc_feature 471, 542, 546: n = A,T,C or G
aaagtgtacctccttaaatggaaggaggaatccttcaggggagggaaggtgtttaccttcttaataataaaaggtctttcaatggaaaagtatacctacctggggcatagaaggctgggagggaggagtcaagttacggagctttgaaatttttttcatggctttgtatgttgaaatttgaaatgtataacgtgaatgttgtatggaatatctttgatttatgtaaaaaaattttttagggcctgccttaagtgtgaaagtaatgactgatgaaagtggaaaatccaaaggatttggatttgtaagctttgaaaggcatgaagatgcacagaaagctgtggatgagatgaacggaaaggagctcaatggaaaacaaatttatgttggtcgagctcagaaaaaggtggaacggcagacggaacttaagcgcaaatttgaacagatgaaacaagataggatcaccagatccanggtgttaatctttatgtgaaaaatcttgatgatggtattgatgatgaacgtttccggaaagagtttctccnttgng

SEQ ID NO: 1136 - DNA, 503 bp, Homo sapiens
  misc_feature 236, 242, 245, 250, 253, 256, 267, 317, 361, 362, 430, 438,457, 458, 465, 486, 493: n = A,T,C or G
aaagcctttttttaggccacattgacagtggtgggcggggagaagatagggaacactcatccctggtcgtctatcccagtgtgtgtttaacattcacagcccagaaccacagatgtgtctgggagagcctggcaaggcattcctcatcaccatcgtgtttgcaaaggttaaaacaaaaacaaaaaaccacaaaaataaaaaacaaaaaaaacaaaaaacccaagaaaaaaaaaaanagtcanccnttggnttntgnttcaaaccctnaaaaggggaagcaactccgtgtgcctggggttcccgagggagctgctggntgacctgggcccacagagcctggctttggtccccaacattgcannatggtgtggtgtttgtaggctgtggggtctggctgtgtggacctgcccgggcggtcgttcaaagggcnaattccanccactggcggccgtactannggatccnactcggcccaacttggggaancatgggnatacttgttt

SEQ ID NO: 1137 - DNA, 96 bp, Homo sapiens; identical to SEQ ID NO: 1009

SEQ ID NO: 1138 - DNA, 527 bp, Homo sapiens
  misc_feature 406, 456, 468, 487, 501, 506, 512: n = A,T,C or G
cctaacaaccagtaagataattttagacaattctattgaaagttattcaaaaggcatcaagtcaaaataacgaaactgccccagtaaaaaggggctgggcctgggggccaggaaaggcaagcatgagggcccagtagaggtggacctgtccctatggtaactgagctcggctttaaggccaggcattggggatcagctgctaggagcccacctgtgttcttcctgaggggtgggggcaccctagtcactgcctagaggcacatggtcccccaccagcctacagcatggaaacacccaatgtctgctctagcctattcttaacccacaactgggatgggagctggggacaggagaaggggtcatggggccaggagcctattcaggctctacaaccagacttccctanagaggccccgtgccagttagtccaatggacctgcccgggccggccgctcnaaaggcgaattncacacacttggcggcccgntactagtggatccnactcngtccancttggcgaaatatgg

SEQ ID NO: 1139 - DNA, 117 bp, Homo sapiens
  misc_feature 97, 101, 106: n = A,T,C or G
cctctggcgcccccactcaagactaccaaagccaggacacctcaagtctccagccccactaccccaccccactcctgtattcttttttttttttttnaaanagggntttgttccgtt

SEQ ID NO: 1140 - DNA, 255 bp, Homo sapiens
ccatgacagtgaaggggctgttaggaatatcaacaccaccgaagcgcacatagatcacatatgtgcccggcttggcagctgtgtagaagatgtcataggttccatcttcattctcaatgacatcggcctcggcctcagtgccatctggggtcagaaccgtgcaggtcactttacccttcccggcagtcttggcatcaaccacaaagcctacttcttcgccagttttcacagtggaggcgattccaggacccgtgg

SEQ ID NO: 1141 - DNA, 224 bp, Homo sapiens
cctcatctgtgctctcgctgggcacgtggcttcatgtcagtaagcaagatgcttcttaataacccaccttctgccccactctattccttatcctgctgcccctgtaggggtcaagggccctccgtctacaccctcttcttctcctccatcctttattcagagtcatctcgcccttccccatgggtgggggaacctgtgtttgtttgtgtgcacatgtaaatttt

SEQ ID NO: 1142 - DNA, 337 bp, Homo sapiens
ccacttcaagtcacacaggtagataaaaacaggtccttttaggggccaaaggagaggttatcacagcagcagtttggttctcagcagaaatgcccagggcccctgttccacatcaaagctacaagcactgttgtcagggcatggagagtgacgggaccagagccctcctcgtctcagggcagcctgcctggcttcaaggtggagatcacagcgtcctctggggtcataggttcccccactgttccacaggagggaactggtccacctcgcccacctctgtgctcagctgctcccccagggcgaaggtcagcttataccgaagccgcaccttctcctt

SEQ ID NO: 1143 - DNA, 406 bp, Homo sapiens
ccaagacagtccacttacatggatcgtgtcttcaagcaatttgtgcaagccatggttgagcatggacatgaactctcttaacatgtagttctttgggtgcattttgtctgaaccacaattgtgaaggcagctcagcttagtgcacaaattttaactgttgtatataaagcaaataagccagcagatgggtgaagaggtccagaatgatatgcaaaaactactttttagagaaacaaaacaactttgtagcaacaaattaaatatagtattagattgttacttacgtagattttatttttactatgccttaccaagtacatccttaaacaaagtagtatgtacatgaaattgcacttaaccaaaactattgtgtaaaacaaattttaattcctcagggttttaattt

SEQ ID NO: 1144 - DNA, 552 bp, Homo sapiens
  misc_feature 424, 475, 486, 494, 543, 552: n = A,T,C or G
ccagcagtcctcctgacatggactatgaccctgaggcacgaattctctgtgcgctgtatgttgttgtctctatcctgctggagctggctgtgcagagaggcatgctgagccaaatgttgtctgccatcctgttgttgcttcagctgtgggacagcggggcacaggagactgacaatgagcgttccgcccagggcaccagcgccccacttttgcccttgctgcaaaggttccagagcatcatttgcaggaaggatgcaccccactccgagggcgacatgcacgtgagtgtcatgatggaactttgtgtttaggtggcactcgagtctagttattttttacgcaagaccagcgtgcttgtgcacggcagtgtttttctctggtgtgtgtgtgtttggtgataacagcagcaagtcagatgagacanggtgcggggggccacttgtttgtggagaagactcagatcaagtgcgcgccnacttccttgtnagcacaanaaccaagcttgaaacatgcacttttaccttgcccggcgggcgctcgaanggcgaattn

SEQ ID NO: 1145 - DNA, 344 bp, Homo sapiens
ccatcagcagaccaggccagggaggtgcactggggtggttctgccttgctgctggtactgataacttcttgcttcagttcatctacaatgatctttccctctaaatcccagatcttgatgctggggcctgtggcagcacacagccagtagcggttagggctgaagcacagggcgttgatgatgtccccaccatctagcgtgtaaaggtgtttgccttcgttgagatcccataacatggcctggcctttatcctaactatctgaatcccagtagtggacagtggggtcaacatcatgtatcagttggaggacttggagacagcttctatgagtatttgctgaagg

SEQ ID NO: 1146 - DNA, 403 bp, Homo sapiens
ccagtccctcgaggggctccagtctggaggtgagacttccatgggcatagagtcccagtcccgggtgagacctgctttgatgggggccatagaggtgcagcaaggaggccctgctgcaggccatgactcccccaggccacaccggacaagcaggtggatgaaggaaaatgggaaaggtgatcagggcaggagcaagcttgtgcaaagacccaacgatgcaagatcctggcacgcttcaggaatacagggagtttgcgggagagtctccttcctccttagaagtggctcagagaggccgggcacggtggctcacgcctgtaatcccagcattttgggaggctgaggcggccgatcacctgaggtcaggagttcgaaatcagcctggacctcggcccgcgaccac

SEQ ID NO: 1147 - DNA, 213 bp, Homo sapiens
ccacccactctttgtcaaagctttgcgggagggggccgtacacatagtgcttctgccacatgataacgagcgcggtgaaaccgatgaagaacatggcaccgcccacaaccgtcttccactcgttcgagcccctgttcatctcagcaaagctctccttgaacttaatgcgatacaactcgactttctcatccatggagaggctgctccaggagg

SEQ ID NO: 1148 - DNA, 303 bp, Homo sapiens
cctttactttattcagtgaaagtgtctatttagactaagaggtattttagtttcctgaatcagggcatgttgagtaaaggtaatttgccagtcctgggtggggcaaatcctccagcctgatgtgtagggaagggagggggcctgaataatccctgaggagtagtagaatagcagatggaacactgagaagttatttccttgaggatagatttccacgatggaaaggaaatgagaggttctgagaggtgggctagtggcttgtactatagcataacctgcctttgctggtgtgtggcgattagg

SEQ ID NO: 1149 - DNA, 553 bp, Homo sapiens
  misc_feature 476, 480, 509, 511, 540, 547: n = A,T,C or G
cctattctcttgttgaccagggtcaagacctgctctgtgatgcaggctaccttcatcctggcttctgcggctggatccttggtgatggagaagtccagccgaacatagatgataacggtgaagaacaggatgtagaaggccgccaccaccagcaggggctcctgcagcatgagcaccttgttgaacgtgtagtggaccacaatgtcctgaatgtgctgttctaccagatttttcttgtaggcaacaatcacagggcggccaaatgtgtccagataggtgtagtgcagctcatctggggcacggctgatttcatagggactatcaatttcaatgttcttggctccttcaggcaggatgatcttcacagtcagagaatctatcacttgttcatcaaacacatggtccacaaacctcatcttcagtgcatactggtcacccaaattatagaggtactcatagcttgggaggtgtagccnaacnatgtaatggggtcttccacccgcccaaananagggaagcgaggcccggatttccatcttntacagantcatcc

SEQ ID NO: 1150 - DNA, 311 bp, Homo sapiens
ccaggccctgccattgcctgctcacccttgaggtagctctctctttgccctaacctctcagctcaggagcatctatcggctgcacgccaacatcaacacaggcgaagatggtctccaagcgcattgcccaggagacctttgatgcagctgtgcgcgagaacatcgaggagtttgcgatggggccagaggaggcagtgaaagaggccgtggagcagtttgaatcgcaaggggttgatctgagcaacattgtaaagacggcacctaaagtctctgcagacggatcccaggagcccacacatgacatcctgcag

SEQ ID NO: 1151 - DNA, 326 bp, Homo sapiens
  misc_feature 14, 29, 85, 105, 149, 150, 173, 208, 220, 223, 240, 252,256, 266, 285, 299, 302, 304, 318, 322: n = A,T,C or G
aaacaatgcatttnagggggatgacaatnctggagaaaataacatcgtccaagaactgacaaaggagatcatctcagaagtgcanaggatgacgggcaatgacgnctgctgtgactgtggggcgccagatcctacatggctttccaccnncctgggcattctgacctgcatcnagtgttccggaatccaccgagagctgggggtccantattccaggatncantccctgaccttagatgnactgggaacatntganctgctgctcnccaaaaatattgggaatgncatggtttaatggngancntggaatgtctcctnccanctga

SEQ ID NO: 1152 - DNA, 159 bp, Homo sapiens
ccaggagccggccaaattcatgctgattgctcagatggaggaagatgcccttgtctcgaaagctcttacagaaggccatgtccgggtctgtgtcactgcccgagaacacatccctctggggcagctccatccgcagggtatcaccccggatcacatagg

SEQ ID NO: 1153 - DNA, 357 bp, Homo sapiens
ctccaccttactaccagacaaccttagccaaaccatttacccaaataaagtataggcgatagaaattgaaacctggcgcaatagatatagtaccgcaagggaaagatgaaaaattataaccaagcataatatagcaaggactaacccctataccttctgcataatgaattaactagaaataactttgcaaggagagccaaagctaagacccccgaaaccagacgagctacctaagaacagctaaaagagcacacccgtctatgtagcaaaatagtgggaagatttataggtagaggcgacaaacctaccgagcctggtgatagctggttgtccaagatagaatcttagttcaacttt

SEQ ID NO: 1154 - DNA, 563 bp, Homo sapiens
  misc_feature 403, 446, 464, 465, 472, 483, 485, 499, 539, 554: n = A,T,C or G
aaacaatgcatttaagggggatgacaatactggagaaaataacatcgtccaagaactgacaaaggagatcatctcagaagtgctgaggatgacgggcaatgacgtctgctgtgactgtggggcgccagatcctacatggctttccaccaacctgggcatcctgacctgcatcgagtgttccggaatccaccgagagctgggggttcattattccaggatgcagtccctgaccttagatgtactgggaacatctgagctgctgctcgccaagaatattgggaatgcaggctttaatgagatcatggaatgttgcctaccagctgaggactcagtcaaacccaacccaggcagccgacatgaatgcaagaaaggactacatcacagccaagtacatcgagaggangataccccaaggaagaagcaccccggataacgccggccgaaanctttcccagtctttttgnnaaggccngtccaaaaccnanaagaatattttttnggattgcttccaagctttattgcttgatgggggggggatnttaccaaaaaaaatnccccttgga

SEQ ID NO: 1155 - DNA, 135 bp, Homo sapiens; identical to SEQ ID NO: 659

SEQ ID NO: 1156 - DNA, 438 bp, Homo sapiens
ccaagaatctcttcgttcttcctggaacacttactatactaacacagagtttgtaatagttgttgtggacagtacagacagagagaggatttctgtaactagagaagaactctataaaatgttagcgcatgaggacctaagaaaagctggattgctgatttttgctaataaacaagatgttaaagaatgcatgactgtagcagaaatctcccagtttttgaagctaacttctattaaagatcaccagtggcatatccaggcatgctgtgctctaactggcgagggattgtgccaaggacttgaatggatgatgtcacgacttaagattagatgatctctactgacctcttctcatagattttgtataaatgaagtgctggactttacctgaaagctgcaaaaattaatggtttagatatatttataataaactgattt

SEQ ID NO: 1157 - DNA, 463 bp, Homo sapiens
  misc_feature 275, 349, 369, 388, 395, 406, 407, 432, 437, 449: n = A,T,C or G
gtcaccatcaccgccaggttcctctacgggaagaaagtggagggaactgcctttgtcatcttcgggatccaggatggcgaacagaggatttccctgcctgaatccctcaagcgcattccgattgaggatggctcgggggaggttgtgctgagccggaaggtactgctggacggggtgcagaacccccgagcagaagacctggtggggaagtctttgtacgtgtctgccaccgtcatcttgcactcaggcagtgacatggtgcaggcagagcgcancgggatccccatcgtgacctctccctaccagatccacttcaccaagacacccaagtacttcaaaccaggaatgncctttgactcatggtgttcntgacgaaccctgatggctntccaccnaccgagtcccnnggcagatccagggcgaggacactgngcagnctcttaacccanggaagatggcgtgg

SEQ ID NO: 1158 - DNA, 543 bp, Homo sapiens
  misc_feature 334, 340, 374, 417, 421, 423, 441, 447, 462, 465, 473, 482,488, 490, 509, 515: n = A,T,C or G
ccaggatggtctcgatctcttgacctcatgatccgcctgcctcagcctcccaaagtgctggaattacaggcatgagccaccacacctagcccaatctcagtttcttaaatccgaacttgttaagatatttgaataaaattgatcacaagaatagctatgccttgccaaaatacataattagaatgttaaatgtaggtgaaaaagctttcgactaaactaaacttgaatatcacctggtcaaccactttcactcattttttactcttaagagaataattttggtattttgtcttatgactactttggtttatttaatagcatgaatacaactttngctganagccccttcaagtggtgatccttgatgctgccanaaccatttgggggatgcttttaccacccccccttgtgaatttngctngncaagaaccaacaaaaccngggaanaaaggggttccattnccngaaaaaanttattgaanaatttntntggaaatacaagccggaanttggcncatcgggtcaatttggaggttttaaaaa

SEQ ID NO: 1159 - DNA, 392 bp, Homo sapiens
  misc_feature 261, 299, 358, 361, 363, 384, 388: n = A,T,C or G
aaatttgttgtggtacactatcttatgtaacctgtctggtgagtttgtttggacaacctaactcagctttatttgacatgggacctaaaatagaagataagatcttgatattctgtacaagttgatgtaataccctgatgcgttttagaggacttggcataaaatgaaagattggcaaaggcccttgaggggcttggggatgagagtatggaactgtctgcattggaccctaaactggactagaagaggcatcttcaaggntcatacgttgtccagctgtaagttcatttgagtagcanacctaacaaatatttgaggtcaaaaccctaccatgttaaaacaaacaaaaacttaccantgntnataaaaggtttcatttgcttngaangcgg

SEQ ID NO: 1160 - DNA, 366 bp, Homo sapiens
aaacgttaaaagtgtacaagttgctttgttacaataaaactaaatgtgtacacaaaggatttgatgcttttctctcagcataggtatgcttactatgaccttccaagtttgacttgtataacatcactgtcaaactttgtcaccctaacttcgtattttttgatacgcactttgcaggatgacctcagggctatgtggattgagtaatgggatttgaatcaatgtattaatatctccatagctgggaaacgtgggttcaatttgccattggtttctgaaagtattcacatcatttgggataccagatagctcaatactctctgagtacattgtgcccttgatttttatctccaagtggcagttttt

SEQ ID NO: 1161 - DNA, 133 bp, Homo sapiens
  misc_feature 126: n = A,T,C or G
aaaactaatgttacaaatctgtattatcacttgtatataaatagtatatagctgatcattaataaggtgtataagtacaatgtattctaaaactgttaagcaaaaaaaaaaaaccaaaaaaaaatnccagggg

SEQ ID NO: 1162 - DNA, 535 bp, Homo sapiens
  misc_feature 382, 449, 460, 465, 469, 485, 507, 517, 524, 527: n = A,T,C or G
cccagctggtgctgaagctcgtcagttcaccatccgccctcggcttccgcggggcgctgggccgccagcctcggcaccgtccttttctttctccctcgcgttaggcaggtgacagcagggacatgtctcgggagatgcaggatgtagacctcgctgaggtgaagcctttggtggagaaaggggagaccatcaccggcctcctgcaagagtttgatgtccaggagcaggacatcgagactttacatggctctgttcacgtcacgctgtgtgggactcccaagggaaaccggcctgtcatcctcacctaccatgacatcggcatgaaccacaaaacctgctacaaccccctcttcaactacgaggacatgcaggagatacccangcactttgccgtctgccacgtggacgcccctggacctcgcccgtgaccacgctaaagggcgaaattncaacccactgncgggncgtnattagttggatcccancctcggtacccaagctttgggntaatcatggncataacntgntttctgtg

SEQ ID NO: 1163 - DNA, 477 bp, Homo sapiens
  misc_feature 316, 345, 348, 355, 375, 378, 394, 404, 420, 428, 431, 441,444, 447, 452, 455: n = A,T,C or G
ctacacgccgccgcttgtgctgcagccatgtctctagtgatccctgaaaagttccagcatattttgcgagtactcaacaccaacatcgatgggcggcggaaaatagcctttgccatcactgccattaagggtgtgggccgaagatatgctcatgtggtgttgaggaaagcagacattgacctcaccaagagggcgggagaactcactgaggatgaggtggaacgtgtgatcaccattatgcagaatccacgccagtacaagatcccagactggttcttgaacagacggaaggatgtaaaggatggaaaatacagcnaggtcctagtcaatggtctggacaacaanctncgtgaanacctgggagccgacttgaanaangattcccggcccatanaaggggtgcntcccttcttgggggcntttcgtgntcncgaatgcccntcnccnccaanaancacttggctcgcccgttgggcc

SEQ ID NO: 1164 - DNA, 438 bp, Homo sapiens
  misc_feature 271, 288: n = A,T,C or G
cctccagccattttgacattggggtggatagtcgattcacctgcctgtcagtcgattcacctgcctgtcacccagttctgtggatgtgctggtgctgagcctttgctctctttccaaatggttacagggatgttgatcagctccaccagagggagctctgatgggaggaattgctctgccatccttgtccctgtgtctcctgtcggcaggcagccattgtatctcaccagcagaccaggagactggtcccaaggttactgcaccacagggnaatttcctgccatactnaggaaggaaacacctgaactaaatggaagagacatccctgcggtgtttaatatcacacccatgccctttgtcaggttaccatgtacagagattactttggaaagcctcatgccgtcttctacctttcgcacacttggtcaagtattttgc

SEQ ID NO: 1165 - DNA, 177 bp, Homo sapiens; identical to SEQ ID NO: 647

SEQ ID NO: 1166 - DNA, 300 bp, Homo sapiens
ccatgtggctgcccggttccccttcatccctatgccactggactacatcctgccggagctgctcaagaatgccatgagagccacaatggagagtcacctagacactccctacaatgtcccagatgtggtcatcaccatcgccaacaatgatgtcgatctgatcatcaggatctcagaccgtggtggaggaatcgctcacaaagatctggaccgggtcatggactaccacttcactactgctgaggccagcacacaggacccccggatcagccccctctttggacctcggcccgcgaccac

SEQ ID NO: 1167 - DNA, 263 bp, Homo sapiens; identical to SEQ ID NO: 694

SEQ ID NO: 1168 - DNA, 165 bp, Homo sapiens
ccaccaagcagggcaacgctgtgaccctgggagattactaccagggccggaggattaccatcaccggaaatgctgacctgacctttgaccagacggcgtggggggacagtggtgtgtattactgctccgtggtctcagcccaggacctccaggggaacaatgagg

SEQ ID NO: 1169 - DNA, 419 bp, Homo sapiens
ccttcttcaagggtgcgtggtccaacgtcctgcggggcatggggggcgccttcgtgctggtcctgtacgacgagctcaagaaggtgatctaagggccgcggcctcctccacacacacacacacaccaggggaaccaagagaaccacgtagaatcctcaaccgtgcggaccatcaaccttcgagaaattccagttgtctttttcccagccgcatcctgcctgtagatggccggggaaggctctagaaaaggggcgcattgcgatccaaccatcggcagccgattccgtgtcttgatcacggggtgggagggaaccgtggcgtccctgcgtggggcccatgggtgagacactccagtactgagacctagagtccagatgcttgtaggagccaagtcgtgttctaagtatttatttacctgc

SEQ ID NO: 1170 - DNA, 348 bp, Homo sapiens
cctggaatgtcactacccccaggcggttggggtccacaatgcccatgatgcgggcaaattctgcttctccctgggggtcgttgccaatatcataacccaagctgatgaggcaggctttgaactcctcgggacccagtgtgccggagtgatcccggtcaaagtggttgaaggaggcccggaactcattcatctgctcctggctgatgcccttggcatcccgggtcaggatctggttctctacctcattgatggtcctggcgatggtggtgagcagctgctcccagcccacacggatgtgctccatggtgtagttggtgtgcttgttgtcgaagatgagcgcctcctgga

SEQ ID NO: 1171 - DNA, 246 bp, Homo sapiens
cctgctccagagcacggctgaccatttctgctccgggatctcagctcccgttccccaagcacactcctagctgctccagtctcagcctgggcagcttccccctgccttttgcacgtttgcatccccagcatttcctgagttataaggccacaggagtggatagctgttttcacctaaaggaaaagcccacccgaatcttgtagaaatattcaaactaataaaatcatgaatatttttatgaagttt

SEQ ID NO: 1172 - DNA, 552 bp, Homo sapiens
  misc_feature 457, 462, 474, 496, 505, 507, 513, 545, 547: n = A,T,C or G
ccagaaaacccatctatcccactcatggggcagatgatcagaggagctgcacttttccctcccgagtaactcagactgaagtagggccggacaggcccacaaaaggtagcatgagagaaagtgaaggtgtgacacctctctgtcacgttgtagaaggagacctcaccagcatcatagtccaagaaaatccccacccgctggagcggggtccgcaggggtagggcagtcattggggaggtaagagcccaatattctttcccataccacaaagacactgcccagaatccattctggggggctgaggttactccaccttttctgcacactgagtcttcacagacacctatggtccacttggctttatctcccacctctacctcccaataatgtctcccggcgatgaagcatggagagcccaagacacagggaaacagattgaacctctcggggttgtcangcagncctgttggaagnaactgtaccccacttgccgcanattatacanangatcangctggggtaggccgtgtctgggtccaaagccntncctga

SEQ ID NO: 1173 - DNA, 375 bp, Homo sapiens
  misc_feature 182, 244, 302, 303, 308, 335, 348, 349, 367, 369: n = A,T,C or G
cctaacaaccagtaagataattttagacaattctattgaaagttattcaaaaggcatcaagtcaaaataacgaaactgccccagtaaaaaggggctgggcctgggggccaggaaaggcaagcatgagggcccagtagaggtggacctgtccctatggtaactgagctcggctttaaggccangcattggggatcagctgctaggagcccacctgtgttcttcctgaggggtgggggcaccctanttactgcctataggcacatggtcccccaccagcctacccatggaaacacccaatgtcnntctancctatttttaacccacaactgggatgngagcctgtgacannagaacgggtcatgggggncncgagcc

SEQ ID NO: 1174 - DNA, 365 bp, Homo sapiens
  misc_feature 337: n = A,T,C or G
ccattatctacatgtgttttcagcacctggttggttctaaatgggatctggagacccagcttcttggagatttttaagaggaagtattaactggacaaatggaatgggcaccagaaagaaatacagggtcacccagaatggcagaaacctaggtttcccagagtggaaagagagaggagacattcaacaaacaagtatttattgagcgcctactatgtgccaggcactgttctagaccccccccagaagaaaaaacaaaaaacaagatagaggcagcaaacacaaattctgagggagaggaaaggggcagttgagtaagacggctaagggaactganaacctgaggtgatgggggctctgcctta

SEQ ID NO: 1175 - DNA, 583 bp, Homo sapiens
  misc_feature 380, 395, 441, 468, 469, 493, 541, 543, 560, 563, 580: n = A,T,C or G
ccatgtccagccaagggtacaacgtgcttgttcccgatcacccaggtttgccattggaagtcaaagacagaatcgcttcatggcactacagatgtggaaaaataaaaatctcagctagaaagaacgtccgatttggagatagcgggaggacacgaaggagtgggggccattttggtgctgagaggagggtgccccaacttcaggaggaccatgtgacggctgtggttgttttcggggtcacttgcagcacacacagcgtccccttgatgctcgatggggaccgcagacgggcctgcagacctaacccctggctgtggacaggagaggcttgctccaggcttctttccttctcaatgctttacacaggatttccttcattngtgctttcctttggnttaacagctaaaaaagaagagtgagggggcaaaatggtttgtcacnttgtcccaaaacttgaaaaaaaaaagnnggaaagtgggggcgcccaaaatcntctggggggaatgccttcctgggtcctgggagaatcgggttgcccttncntcaagggttttgggaanctnttgcttcctgggaaccnccg

SEQ ID NO: 1176 - DNA, 532 bp, Homo sapiens
  misc_feature 433, 462, 464, 466, 482, 496, 512, 515, 516, 522: n = A,T,C or G
cctcgatggcaaagtcagcctgctctttagtctgcgccttctggacgtaatcccgtcccaccttgatgcgcggggtgaggattcctctggtgaaatcggtcacattgatacccaagagatgggacaccttttgggcagctgtgttgtcgggcatggacgcctggtcagtgttccgctccttcttgaagacgatgttgccgagctgaagaacccctgagatgacccgcagcaggcccatttgctcctcttctgggatgcccataatcctcatggcctccatggtctcctggaacatgtccttgtcctgctgcccggggatggtgacgtgtccattggacaggaagcggtatttgttgtacggctccaacaggagatcggtcttcaggtgctctccagcccccagacaggagataatagaaagatgtggaaggtncgttcttccttggctttggcgggatagcncnanaatttctccaaaaaanaaaagcctcaatgnttgggctccaccaatngtnnccattngacatcaaaa

SEQ ID NO: 1177 - DNA, 527 bp, Homo sapiens
  misc_feature 52, 362, 404, 450, 467, 501, 506: n = A,T,C or G
ccaagaacctggagcccgtatcctggagctccctcaaccccaaattcctgantgggaagggcttggtgatctatccgaaaattggagacaagctggacatcatctgcccccgagcagaagcagggcggccctatgagtactacaagctgtacctggtgcggcctgagcaggcagctgcctgtagcacagttctcgaccccaacgtgttggtcacctgcaataggccagagcaggaaatacgctttaccatcaagttccaggagttcagccccaactacatgggcctggagttcaagaagcaccatgattactacattacctcaacatccaatggaagcctggaggggctggaaaaccggganggcggtgtgtgccccacacccaccatgaagatcatcatgaanggtgggcaagatcccaatgctgtgacgcctgacagcttactaccancagggcccagcaagganggagacaacctttcaaaatggaccttccccggcnggccnaaaggggaaattccacccccc

SEQ ID NO: 1178 - DNA, 395 bp, Homo sapiens
  misc_feature 13, 185: n = A,T,C or G
aaaatgtcttggncttctactgccttgaaaaatgacaattgtgaacatgatagttaaactaccactttttttaaccattattatgcaaaatttagaagaaaagttattggcatggttgttgcatatagttaaactgagagtaattcatctgtgaatctgctttaattacctggtgagtaacttanaaaagtggtgtaaacttgtacatggaattttttgaatatgccttaatttagaaactgaaaaatatctggttatatcattctgggtgtgttcttactgacaccaggggtcccgctgccccatgtgtcctggtgagaaaatatatgcctggcacagcttttgtatagaaaattcttgagaagtaactgtccgctagaagtctgtccaaattt

SEQ ID NO: 1179 - DNA, 196 bp, Homo sapiens
  misc_feature 40: n = A,T,C or G
cgggtcgcggcgaagcgcgcctatgacatctactcgcggntgctgcgggagcgcgtcgtgtgcgtcatgggcccgatcgatgacagcgttgccagccttgttatcgcacagctcctcttcctgcaatccgagagcaacaagaagcccatccacatgtacatcaacagccctggtggtgtggtgaccgcgggcctgg

SEQ ID NO: 1180 - DNA, 635 bp, Homo sapiens
  misc_feature 34, 39, 44, 45, 58, 77, 412, 501, 512, 514, 545, 584, 621,622, 627: n = A,T,C or G
ccacggctgcttccagctccttcctggagaaaanctacnaactnnctgacggccaggncatcaccattggcaatgancggttccgctgccctgaggcactcttccagccttccttcctgggcatggagtcctgtggcatccacgaaactaccttcaactccatcatgaagtgtgacgtggacatctgcaaagacctgtacgccaacacagtgctgtctggcggcaccaccatgtaccctggcattgccgacaggatgcagaaggagatcactgccctggcacccagcacaatgaagatcaagatcattgctcctcctgagcgcaagtactccgtgtggatcggcggctccatcctggcctcgctgtccaccttccagcagatgtggatcagcaagcaggagtatgacgagtncggcccctccatcgtccaccgcaaatgcttctaggcggactatgacttattgcgttacaccctttcttgacaaaacctaacttgcgcanaaaacaagaananaatgggattgggtttatttggtttttttggnttggtttgggttttttttttttggggtggacacaggatnaactgcccgggggggcctttaaaagggggaatcccanncaacngggggcgg

SEQ ID NO: 1181 - DNA, 460 bp, Homo sapiens
  misc_feature 15, 63, 360, 371, 378, 391, 434, 455: n = A,T,C or G
gtcccggacgcccantgggatttcccatgcggggaagaggtggtttttacaaaatgcctcctngtcggggtgggcgtcccatgcctccatctagaagagattatgatgatatgagccctcgtcgaggaccacctccccctcctcccggacgaggcggccggggtggtagcagagctcggaatcttcctcttctccaccaccaccacctagagggggagacctcatggcctatgacagaagagggagacctggagaccgttacgacggcatgggttggtttcagtgctgatgaaacttgggactcttgcaatagatacatggagcccatcagaatggcagatggcttatgaaccacaggtngagtatcatanttgttcntgtgtatatcagngataatttaaaatgcttacctgcttttcaagaaagtttttttntttcccctgaggatactttcnggaaa

SEQ ID NO: 1182 - DNA, 694 bp, Homo sapiens
  misc_feature 472, 481, 506, 526, 602, 612, 630, 634, 639, 648, 656, 676,684, 689: n = A,T,C or G
cctctggaaatgtcagccaagatccgagtaccatttttacgtcaggttgttcccattagtaaaaaggtagcccgggaccctcgctttgatgatctgtcaggggaatataatcctgaggtgtttgacaaaacataccaattcttgaatgacatccgagcgaaagagaaagagcttgtgaaaaaacagttgaagaagcacctttcaggagaggagcatgagaaactgcagcaactgcttcagcgaatggagcagcaagaaatggcacagcaggaacgaaagcaacagcaggagctgcacctggccctgaagcaagaacgtcgggctcaggcccagcagggccatcggccatacttcctgaagaaatctgagcagcgccagttggcactagctgagaagttcaaggagctgaaacgcacaagaaattggagaacttcttgagtcgaaagaagcgacgaaatgcaggcaaggacanggagacatncccctttgagccaaagagtaataanggaacttttccttttgcttntgccacttgcccccagggagaacatgggatctgtgaaggacagaatttggaaccttgcccggggcgggccgcttcnaaaaggggcnaaattcccaccccccctngggngccgnttccttagnggggaatncccacttgggtccccaaccntggggggnaaaanattgg

SEQ ID NO: 1183 - DNA, 556 bp, Homo sapiens
  misc_feature 210, 221, 251, 286, 288, 380, 403, 446, 453, 462, 463, 473,483, 492, 505, 532, 533, 551: n = A,T,C or G
aaacaaacaaaaagaaggtgcgttactatttttttttcacccgggaaagaggtgagaggatgggaaggagcagccaggcgtgggaagcggcgagatcctcgggctgggggtgcccacgtttgctacctcccactgtgaaatcgctggtgctcacaattgtctctcacagtgtatgtgatttttttaaggaaaaaaaaatccctatttaanattctgaaggngctaccattattttgccacagactttgaanaaacttttggatgtggggcatcatccgcatctttntntctcctccaaatgacaaagtttggggaatttttgaattttcctagcatcgcccttgtgctcatcaggtaatctgctaaggaggaaaaaaganaagaaaaaggaaaaaaaaaaagncaaacaaaacccaaaacccaaaaccctcccaaaaccccaaagntggaganattcccttnnaccttttggnctttgaaagnttttgcccnttttaaggccccnggggaggaaccttgcccggggggggcnntttcaaaaaggggcaaanttccc

SEQ ID NO: 1184 - DNA, 363 bp, Homo sapiens
ccaggctgcccctgggcggggccatgtggcctcagaccacaagagcggagctgccctggcccaagcactgcagctgcctgcacccccgggcttcgcagccttgcttgttttctctgaacagcaacagaacagtgttcacagcgattcaaagggtggcattgggttggacgttctgggtacaagccaacctagtcccacgttgtacgtgaatgtttaatgtgctctcaaaacatggaaaataagtttagtgcacatagctaaatcacaaaacatccaatttctctgtttcctcaggaagtcattactgcgccaccacatcacatgaccttaacatgatcaatgtatttctctgccttgacattt

SEQ ID NO: 1185 - DNA, 341 bp, Homo sapiens; identical to SEQ ID NO: 739

SEQ ID NO: 1186 - DNA, 499 bp, Homo sapiens
  misc_feature 135, 209, 241, 250, 260, 266, 272, 343, 407, 431, 475, 483: n = A,T,C or G
aaaaaatgaaaatctggtttgtaacaaaacacctttgagaatatgccatgagaaaaaaaaaatatttatatacttaaaacctgatctctcccaattcttttgctttatattattacttcttggtcatttccatcnctctacacaaataaagaattctaaagcttaattaaaaatcttgattatacacttcatgtatcatggtttggganagttatctggttcttgaagtgagcccgaaagnactgctggngttatgtatntgaaanaacaanactgacccaaaccaaagccctaggccatatagagtagggcacccctatagtatagttcatgtcatctttanaactccctgctgctacagttcctgactgactttttctgatttgataaaatatataatgacttcntaatattgaaattttccaaaacanacaatttgtaagaatgcaatcaaaaactttaccttgggccgggnaccccgcntaaggggcggaattcc

SEQ ID NO: 1187 - DNA, 526 bp, Homo sapiens
  misc_feature 312, 330, 342, 366, 372, 420, 421, 441, 448, 456, 465, 480,482, 490, 502, 513, 524: n = A,T,C or G
aaaagaattaaataaaaacctgagaagtctaacgtgaagctaggactcctgcctgcttcccttcaggcacctgctgtgcctccttctccgcagatgctctggttggaagcctcctgcactgccttctgtaacagcaccagctggacgttgtcatgaaatgtcacgagttctgggtgtttcctggtctgcagtccgcagctccctgccatcggccacccgatctcacgatggcacagcagacaaactctgaggagcctcccaggagcctagggcttttcctccgccctcttctgtaagcagactggacagcangcccctgggatgttcacngggacagcacangtggcaggggggcaagcttccacnaagcangtgaccttgcccgtctttgcattcacaaatggtgcatgcatctttttnncacttggtgttgttggcggngagattngcccccgnatccacccncttttgggacttgancncgagaatnaaagtttctttntctttgtcttnaggcctgggangg

SEQ ID NO: 1188 - DNA, 290 bp, Homo sapiens
ccaacaggctctttggggaaaagtcttgtgatttcctctcatcttttagagattcctgccaaaaattctaccaagcagagatggaggagcttgactttatcagcgccgtagagaagtccagaaaacacataaacacctgggtagctgaaaagacagaaggtaaaattgcggagttgctctctccgggctcagtggatccattgacaaggctggttctggtgaatgctgtctatttcagaggaaactgggatgaacagtttgacaaggagaacaccgaggagagactgttt

SEQ ID NO: 1189 - DNA, 570 bp, Homo sapiens
  misc_feature 412, 448, 523, 526, 541, 553, 558: n = A,T,C or G
cctctgctggcatttgcctgtgatgacaaagacggcaaatatgacagcagccgggaagccggaactgtgaagctgtttgggcttcctaatgattcttgagaggaggttgtagggagaggaggccccggcagaggtcttccttcatgtggttagtttggtctgttctctcggagttggtgggcaccctaaatatttgtaagttggtataaattgtaaacgtctctggtcaggctgcgcatttcgttcttttgctttgtctgtgtattagctctttccattctttgcccccagcatgagttaactcgcgtggactctgcagtgcgagtagtgaccccagcataccttgtcctctggacctcctgtcttctctacttctgggtgcatggtagactttgtggcatttgatacaacntggacaatacctaatttggagggaagggaatggaanggcatggaagtttttttacctgccccgggcggccgctcgaaaggggcgaattccaacacaaccttggcgcggtantantggatccgactcggnccaaactttggngtaancatggggcataa

SEQ ID NO: 1190 - DNA, 234 bp, Homo sapiens
ccaccagcaggaatgcagcggattcctctgtcccaagtgctcccagaaggcaggattctgaagaccactccagcgatatgttcaactatgaagaatactgcaccgccaacgcagtcactgggccttgccgtgcatccttcccacgctggtactttgacgcggagaggaactcctgcaataacttcatctatggaggctgccggggcaataagaacagctaccgctctgaggagg

SEQ ID NO: 1191 - DNA, 703 bp, Homo sapiens
  misc_feature 38, 406, 438, 446, 449, 467, 504, 517, 521, 533, 535, 540,561, 563, 587, 601, 602, 604, 613, 618, 628, 649, 675, 685,690: n = A,T,C or G
aaagcaagaaacagaatgcgagtaatcagaaagcactngcaggcatcagttaatccaagatactagctcttagttccaaaagcacttgcaaagaaaaccttttggggggaaggggtggagagggatggaagcactccataataactggaatcccatgagtgtgtatgccaagtctcatgaggctattttttgaatttatcctttacttggtcatggttttttccctcaaatacaatttttctttgactttttttcctcaaagtataaaaagtatgaaatataaacaagctctttgcactgcacacttagaagtgtacaattcaagcattatagagctatctacacactgataaatcccatcgaatcttggataattcattaatatacaaaaatatcagggcacagnaaagaaactaaaaccccctttcttttttgttncacattanganttcaaaatttttcaatcntaaaggaaaaaacccaaattccctttttcgctttttnttttttacctttntgcnttggggggatancnctttntttaaaaaaaaatttcccggngnttaaatcattggtttgggggggtnacctattttccaanncngggttttanccttngggcccgggnaacccccccttaagggggcgnaatttccacccccctttggcgggccngttcctttgntgggnaatccaaacttgg

SEQ ID NO: 1192 - DNA, 279 bp, Homo sapiens
aaaaaaagagccgagagaaactctgggagggtggttatcacctcctggctggcagcttggggaagtaaggctttggaagacggcgggcgcaatgacacacccaccgccacaggaaaacatggtcattccagaaggcccaggagaaactgtgggaataaataaaacctccctcctcccactggcggcaagtgctgttttaagcaaaatcctcatttcaatgtgagggtaagaaaactattctggttcaggtgtatcctttgtccaaggtacgagaggagg

SEQ ID NO: 1193 - DNA, 335 bp, Homo sapiens
aaaatcacaaacattaacggcagtaggcaccaccatgtaaaagtgagctcagacgtctctaaaaaatgtttcctttataaaagcacatggcggttgaatcttaaggttaaattttaatatgaaagatcctcatgaattaaatagttgatgcaatttttaacgttaattgatataaaaaaaaacaacaaaattaggcttgtaaaactgactttttcattacgtgggttttgaaatctagccccagacatactgtgttgagagatacttagagggagggagtaggttttgaagaggttgatggtggtggggagggaaggacctcggcccgcgaccac

SEQ ID NO: 1194 - DNA, 306 bp, Homo sapiens
aaaaaaatccaaatgctggcattgtccagaaaaatttaacaggtttatttataattattataaagttgaaccgctgaaacttgttcactgaaacattttaacttgcattaatgctttacgtctccgcatttatattaaaaattcacacacaaatgaaaatggaaaaactgccaatacctgatttctgtcccctatttttccactcgcaatcatatacttaggtaccttttgaccccatggaaaaaaaatatctaacgttcagaactaccaataacaggaagaagagaaattttttttttttttttt

SEQ ID NO: 1195 - DNA, 372 bp, Homo sapiens
  misc_feature 197, 290, 316, 338, 340, 354, 360, 363, 365: n = A,T,C or G
ccatctacaatagcatcaatggtgccatcacccagttctcttgcaacatctcccacctcagcagcctgatcgctcagctagaagagaagcagcagcagcccaccagggagctcctgcaggacattggggacacattgagcagggctgaaagaatcaagattcctgaaccttggatcacacctccagatttgcaaganaaaatccacatttttgcccaaaaatgtctattcttgacggagagtctaaagcagttcacagaaaaaatgcagtcagatatggagaaaatccangaattaagagagggtcagttatactnactggacgtgactttggacccnanaccggctaccccanctgatnctntntgataat

SEQ ID NO: 1196 - DNA, 612 bp, Homo sapiens
  misc_feature 488, 502, 505, 534, 537, 552, 580, 584, 600, 602: n = A,T,C or G
aaacagttggaacaccggtggcactgttaactgctttctgggcagcctctttagcttggtgggcttgtagtacagctacagcttcatcaaccttagaacggagtgactctggagactcgagcatatgaagaagttctgaattatcaatctccaacaacatgccagtgattttaccagcaagggtagggtgcatggcttgaataagaggaaacagccgttcacccaacatttgcttttgctcttgaggaggggcagatgccaacatggaagcagtcaaaggttcctgaccttgtacatgaacagcaggctgttgcattgtaacttgtggctgtgcattaagatgttgctgaggattgcgaactcctgcagcatatttatactgtggaacggtgcggacagcaagagtagctgcagcggctgcagctgcaggacgtggacccattgtctgtgttgatgtgttagcaacacgctttgttgacatgactctnggaacctgtgaaanaanctggctcatagtactaaatgggggtctanaancactgggcggatacncccgggcatttttggaatggatgaaggntggnacccttaacaatccancnaggacttggt

SEQ ID NO: 1197 - DNA, 284 bp, Homo sapiens
  misc_feature 255, 258, 264, 269: n = A,T,C or G
aaatctgacaaactaaaaagtttaacgtcttctaaaagattgtcatcaacaccataatatgtaatctccaggagcaactgcctgtaatttttatttatttagggagttacataggtgatgggggaaattgttaactacctttcattttcctgggaagtcaaggttacatcttgcagaggttgttttgagaaaaaagggcccttctgagttaaggagccatagttctatcaatgatcaaaagaaaaaaaaaaaganaanctgttncagtntgattcaaatcattt

SEQ ID NO: 1198 - DNA, 347 bp, Homo sapiens
  misc_feature 32, 93, 113, 128, 139, 226, 230, 250, 255, 303, 332, 334: n = A,T,C or G
aaaaagaactggcagctcctacagagacttanaagaggagtgaggatgcatttcttcccagtggtctctgactgcctcaactatcaggagggntcaaagcccacaactggaanaagaatgatttcttncttgtgcccanatttactgggacatccctgattcctgaaaatcctatagcccaggctattcttaaatcttttgggattgtagagggtactggagtganggtngcaggcacgatagggatcanacaantaaagccacctaggctgagggatacccctcactcctttactccatatnaccaagtgaggagagggctagttcctttncncagtggcccttcc

SEQ ID NO: 1199 - DNA, 190 bp, Homo sapiens
ccaaggaaggctgtgctctagcccacctgaccctgtctgcaaaccacctgggggacaaggctgttagagacctgtgcagatgtctctctctgtgcccctcactcatctcactggatctgtctgccaaccctgagatcagctgtgccagcttggaagagctcctgtccaccctccaaaagcggccccaagg

SEQ ID NO: 1200 - DNA, 363 bp, Homo sapiens
aaaaaattatactgatcaaaggactgatccagggtttaatatttcaaaaacacagataaatagtttactacagataaatagcttcaccctttgggtgtctcccagaagcatctgaaaaatttctagagggggtctgttgaagatgtgtaactagtacaccccaacccccaacctcagtggaaagcaatgcccagggattaggctatggaagggcaaaatggacccattcaaatttcctcccagggaccaggccctattaaccctgggaaatgtccttagctggtggggaaaggttggcgatcaggaatacatatgtgtagtttttgttagaagccatccatagcacacccgagggatgaaagg

SEQ ID NO: 1201 - DNA, 318 bp, Homo sapiens
  misc_feature 305: n = A,T,C or G
cctgcagagctgctgaggagtttgtcaatgtctactacaccaccatggataagcggcggcgtttgctgtcccgcctgtacatgggcacagccaccctggtctggaatggcaatgctgtttcaggacaagaatccttgagtgagttttttgaaatgttgccttccagcgagttccaaatcagcgtggtagactgccagcctgttcatgatgaagccacaccaagccagaccacggtccttgttgtcatctgtggatcagtgaagtttgaggggaacaaacaacgggacttcaaccagaacttcatnctgaccgcccagg

SEQ ID NO: 1202 - DNA, 368 bp, Homo sapiens; identical to SEQ ID NO: 378

SEQ ID NO: 1203 - DNA, 546 bp, Homo sapiens
  misc_feature 447, 493, 541: n = A,T,C or G
aaaatatatgtatttaaaaacaaaaagcaacagtaatctatgtgtttctgtaacaaattgggatctgtcttggcattaaaccacatcatggaccaaatgtgccatactaatgatgagcatttagcacaatttgagactgaaatttagtacactatgttctaggtcagtctaacagtttgcctgctgtatttatagtaaccattttcctttggactgttcaagcaaaaaaggtaactaactgcttcatctccttttgcacttatttggaaattttagttatagtgtttaactggcatggattaatagagttggagttttatttttaagaaaaattcacaagctaacttccactaatccattatcctttattttattgaaatgtataattaacttaactgaagaaaaggttcttcttgggagtatgttgtcataacatttacctgcccnggcgggccgctcgaaagggcgaattccaacacacttttgcgcccgnttctaatggatcccaactcgggacccaaacttggcggtaatcatgggncatta

SEQ ID NO: 1204 - DNA, 594 bp, Homo sapiens
  misc_feature 416, 418, 420, 427, 473, 499, 501, 509, 517, 562, 576, 577,586, 590: n = A,T,C or G
ccaccatccaaaaaagcagtcagatggaatggaagaatacaaaacctttggtctaggacttactaatgttaaaaaaaataggtgacagggaacaggttaagaaaactatgtaaatgtaggaaagatgggaggaaataaagccctgttctggatcccccatcccctccagaataagagcatgttctgcatgtattaatcttttatgctgtttatgaaacaggcaagataagtctgtttttccttctggaaccataagggtaaccagattttcatctacagacaagtggtagtcatttgtgtttatcatgcaacttacttacaaacaccaagatattaattgctgcaacttgatgtcaaatcacattactgggtaatttttaagactatgtacccacaccatcatacctacatatttntntnccctacnttccaacctgtgtgccaagtgacagctatttttttatttacatggnaattcattaaaaattggcttataatntnttagaatntccaaatntgtgggtttaaaataaactttccccccccccccccccctttgtantttttctcttgggnnggaaccccnttangggg

SEQ ID NO: 1205 - DNA, 103 bp, Homo sapiens
aaaatttcatcataggaatttgggtgaccttttgcactcagtattaaaaaaaaccatcaagttgctctttggaacagtagcatttaggtttgttttttttttt

SEQ ID NO: 1206 - DNA, 458 bp, Homo sapiens
  misc_feature 245, 396, 405, 422, 426, 436, 438: n = A,T,C or G
ccagagggtgtgacccagttaccctttaacccccacccttccagtcgggtgtgagggcctgaccgggcccagggcaagcagatgtcgcaagccctatttattcagtcttcactataactcttagagttgagacgctaatgttcatgactcctggccttgggatgcccaagggatttctggctcaggctgtaaaagtagctgagccatcctgcccattcctggaggtcctacaggtgaaactgcangagctcagcatagacccagctctctgggggatggtcacctggtgatttcaatgatggcatccaggaattagctgagccaacagaccatgtggacagctttggacctgcccgggcggccgctcgaaagggcgaattccacacactggcgggncgtactagnggatccgaagcttcggnaccnaaacttgggngnaatcattgggcattagttgt

SEQ ID NO: 1207 - DNA, 431 bp, Homo sapiens
  misc_feature 60, 74, 82, 93, 112, 116, 132, 150, 154, 168, 175, 180, 184,187, 210, 217, 223, 243, 275, 312, 314, 321, 327, 331, 355,372, 383, 399, 402, 403, 413, 417, 418: n = A,T,C or G
aaagatgtctttttttattttacttttttttaagcaccaaattttgttgttttttttttntcccctccccacanatcccatntcaaataattntgttaaccaccattccaanaggncgaggaaagcttaaanacctactacctctgcctngttnctctttaatttttnatttttncccancagnatnaatgtttttgcatactttgcgtntttattnaaaagngtaaactttttttgtcaatntatggacatgcccatatataaaggaaatgggngggtcaaaaagggatatcaaatgaagtgataggggtnanaatgggnaaattnaagnggggcataacattgccaaaatagngtgccactaaaaatggngtaaaggctgncttttttttttttttnacnnccccgggggncccnncaaaggggaaaat

SEQ ID NO: 1208 - DNA, 747 bp, Homo sapiens
  misc_feature 423, 498, 504, 520, 544, 557, 580, 585, 586, 599, 614, 631,646, 654, 660, 662, 666, 671, 687, 697, 717, 747: n = A,T,C or G
ccatcttccacaagtactccggcagggagggtgacaagcacaccctgagcaagaaggagctgaaggagctgatccagaaggagctcgccattggctcggtgagtggcctcctccccaggaccccttttcccacccttgtcctttggaagcaggattaggggagagagaggtgccaggtgcatctgactcacatttacccacattctgaggccctggtccacatgtagaccctgagctgtagacccactctcccagcgggtaggggatgcttccagccggatatccatctctccaaatgaggaccagtaactgagaagtagctgaggagaagcaatgccaaagtgacatgggtccttggtgatgagggagcacagagccacttgcagagaggattgcctgggagggggaaggggaagaatccanggttgtcatcaccacttgagtatggatttcacattctaacacattaaagcttgcaggatgctgaaattgcaaggnttgatngaagaatttggaccgnaacaaggaccaggaagtgaacttncaggagtatgttncctttcctggggggcccttgggntttgnntttcaaatgaaancccttcaagggctgnaaaataaattagggaanaatggagaaaacctnttgggggncctttntnattnaaatncaggggggggtaatgntccaaaaaantttttttgggcaaattactncccggggggcaaagggggaaattcaccccn

SEQ ID NO: 1209 - DNA, 213 bp, Homo sapiens
aagctgtccaagaagaagttgcgccgaatgaaccgcttcactgtggctgaactcaagcagctggtggctcggcccgatgtcgtggagatgcacgatgtgacagcgcaggaccctaagctcttggttcacctcaaggccactcggaactctgtgcctgtgccacgccactggtgttttaagcgcaaatacctgcagggcaaacggggcattgag

SEQ ID NO: 1210 - DNA, 743 bp, Homo sapiens
  misc_feature 332, 353, 356, 376, 384, 424, 434, 456, 471, 488, 489, 495,500, 556, 561, 569, 588, 598, 609, 610, 659, 666, 721, 725: n = A,T,C or G
ccaagcagggacacaagaggaaaaactggaaggtgcgtcgctttgttctaaggaaggatccagctttcctgcattactatgacccttccaaagaagagaacaggccagtgggtgggttttctcttcgtggttcactcgtgtctgctctggaagataatggcgttcccactggggttaaagggaatgtccagggaaacctcttcaaagtgattactaaggatgacacacactattacattcaggccagcagcaaggctgacgaccgagtggattgaagctatcaaaaaagctaacatgacaagggacctgagggaaccaggattccttccttnctcccagatgacacagacaanaanttccttggaagaatggggantggttaangactttttgactttctttggtaaagtttttggtacttgcnttttgggaanaagtggaaatggcttgcccaangaaatttcccttcangaattaccaaaaaccannccaggnggggnggcccatttttccctttcccccattcttttcattggtttaaccaaaacccttgggnaaaanggcttaanaaaacaacccatttaaggncggtcaagcnattcttttganntttttcccccagcattcaacaaaaaccaggccatttttctttgggccanccaaaantaggtttcccttttgttggaacaattaaccctgggacctgccccgggggggccgntccnaaagggggaattcccccc

SEQ ID NO: 1211 - DNA, 345 bp, Homo sapiens
ccagtttgccctctcaggctcctgggatggaaccctgcgcctctgggatttcacaacgggcaccaccacgaggcgatttgtgggccataccaaggatgtgctgagtgtggccttctcctctgacaaccggcagattgtctctggatctcgagataaaaccatcaagctatgaaataccctgggtgtgtgcaaatacactgtccaggatgagagccactcagagtgggtgtcttgtgtccgcttctcgcccaacagcagcaaccctatcatcgtctcctgtggctgggacaagctggtcaaggtatggaacctggctaactgcaagctgaagaccaaccacattgg

SEQ ID NO: 1212 - DNA, 280 bp, Homo sapiens
  misc_feature 265: n = A,T,C or G
aaattacaaagctatactttccttaatatatttacacatagttttaagatgttctcatggctatggaagccattttcagcatatagcttataatatacacttaatcgtctacatatgtgcattctttctttacagacacacacagcctacgacactgcaacagagcctcacctcacaggaggtctgggggactcttaagtacagaaacctgcttttaacagtctaaacaggataaaaattgcataacaatatcccatattaaggncagccatggcataaa

SEQ ID NO: 1213 - DNA, 342 bp, Homo sapiens
ccacaacacatcaatcccaagcaccacctatcccatagaagcttctgggcagcaatgctccaaacaaaccagggtgcctggttcacatgttctcacccaaaggagccttcagggaccaatccacagtaaacacacatgcttgcctatcccagtacttgagtattttatgggttctgctctaagctgaagcagaactgcctgcctgagaaccctgaactaggttagttttgtgggtccttcgtggggcagcatctatgtaggaggctggactttgggttcctcttgaaataatgaggtccctagagggatccttagaaccaactaatcctaccaagagctttt

SEQ ID NO: 1214 - DNA, 294 bp, Homo sapiens
aaaaccatgcaccgatacacactggaaatgttcagaacttgccagttttgtcctcagtttcgggagatcatccacaaagccctcatcgacagaaacatccaggccaccctggaaagccagaagaaactcaactggtgtcgagaagtccggaagcttgtggcgctgaaaacgaacggtgacggcaattgcctcatgcatgccacttctcagtacatgtggggcgttcaggacacagacttggtactgaggaaggcgctgttcagcacgctcaaggaaacagacacacgcaacttt

SEQ ID NO: 1215 - DNA, 371 bp, Homo sapiens
  misc_feature 363: n = A,T,C or G
ccattcttttatcttgggtccatgtgagtgacagaaatggtgcggcctgggaaagatctccctcctttacattttctcttctccctcctcctccttattctaaaactgtgcctccaacagaggggcaggggctcttgtagagagatccctggcccaggacaggagatgccaaatctaatttatctcactgagggcctttgagaaaaacgcttcagggccaggctcagtggctcatgcctatataatcccagtactttgagaagctgaggcggcagatcacttgaggccaggagttcgagaccagtctcgtcaacatggcgaaaccctgtctctacaaaaaaaaaaaaaaattatcccaaactngggggccc

SEQ ID NO: 1216 - DNA, 654 bp, Homo sapiens
  misc_feature 82, 85, 371, 372, 383, 403, 425, 437, 468, 469, 472, 485,496, 499, 523, 537, 565, 570, 571, 575, 580, 586, 597, 614,616, 621, 630, 639, 641: n = A,T,C or G
aaactttcagtggctgtgcagagtcgagggaggaaccagccctctggtttactggaacatagtcttccatctataccactanggntttgtcttatgtttacttttggtaactctcttccttctttttctccctaccccccaacccctagcccaaccaatgctagaatttcttgctctgaaggaggagcaggtgaaacaggtggtaattttccttctcggcccctattctggttcattcagcactttttggtgggaactgttggagattccagggtaaggaggaagatgcctgttctccctgtctgaagagggagatgagacagctctctggacaggaattaacaaaccctggagcagcccaaaggaaattnntgtgaaaagangagggaatgagattattcgnaggaagggaatgggggaaacancctgagtaaaangcttggaagttggaattaacagtggggagcnnaancacttcattactnttttaggccanaanaatccaggccccagctggcagaanaaaacttaaaaaantcttatgggaatttaccttgccccgggngggcnnttcnaaaangggcgnaattcccaccnacacctgggcggccggntntctgnggaatcccnaactttggnanccaaaattttggg

SEQ ID NO: 1217 - DNA, 479 bp, Homo sapiens
  misc_feature 271, 315, 352, 380, 443, 444, 445, 457: n = A,T,C or G
ctggtcctggccttgctgtcctccagctctgctgaggagtacgtgggcctgtctgcaaaccagtgtgccgtgccagccaaggacagggtggactgcggctacccccatgtcacccccaaggagtgcaacaaccggggctgctgctttgactccaggatccctggagtgccttggtgtttcaagcccctgcaggaagcagaatgcaccttctgaggcacctccagctgcccccggccgggggatgcgaggctcggagcaccctttgcccggnttgtgattgctgccaaggcactgttcatctcaactttttctgtncctttgcttcccggcaaagcggctttttgcttgaaangttcatatcttggaagccttgaatgtcnttaaccgaaataaaagggtcccattgcttccaaccccgaaaaaaaaaaaaaaaacctttgggnnngggaaacccccntttaagggggggaaaatttcca

SEQ ID NO: 1218 - DNA, 173 bp, Homo sapiens
ccagattcctcctctaaagaagcccctgggagcacagctcatcaccatggactggacctggaggttcctctttgtggtggcagcagctacaggtgtccagtcccaagtccaactggtgcagtctggggctgaggtgaaaaaacctgggtcctcggtgaaggtctcctgcaagg

SEQ ID NO: 1219 - DNA, 201 bp, Homo sapiens; identical to SEQ ID NO: 1110

SEQ ID NO: 1220 - DNA, 506 bp, Homo sapiens
  misc_feature 214, 316, 323, 358, 364, 368, 377, 380, 429, 438, 440, 444,459, 461, 470, 481, 493, 494: n = A,T,C or G
aaaaagtttcaggtcacaacccttgcagaaaacactgatgcccaacacactgattcgcggtccaggaaacacgggtcttccaagttccaaggggctggggttccccaacgatcaagttcctgtgctgtaatcaagagggtcctttggactggatagggagcacttgggagctgtacaccatcagtcataatggatggcagtgtaaaagatgatncaaatgaccatgaacaaggcaaaagaggtcataaacccttccttcgtgagctcccacgtgccaccatattcttcctcatcaatctgtaggtaattgctgaantagaggnacacgactcctgcatttgatcaggcagaatgctgntatttncaanaacccctcntantggcaaaactccccaaattgacaccccaggacccccgcattgatttgtngggaaccantngatnacatctaaaaatttntncttatcctnccagggccgcntcgcttccgcannacctttacttca

SEQ ID NO: 1221 - DNA, 248 bp, Homo sapiens
aagtcacagctatcttccagcctgtcttctctaggaacgctgttgacatgccagggctccgtctacactggaagcagctatacagctgtgaccacatcgagctttagccagtcacacttctggaactgtccgttcagtccatcccatttctggctaagctcctcacgtaggtgcgtaggttctggttaataaaattcactgttgtgtgaaagacatcacggagcaaggacggcgtgtgactggacctg

SEQ ID NO: 1222 - DNA, 381 bp, Homo sapiens
  misc_feature 332: n = A,T,C or G
aaaaaagttccaacacacagccatgaggagcctcagttttgaaagaggtgcataataaaactactaaccagaggagtctatgccattttaagaaaaacaattaacctggttaaagagaaatgtcttatgtaaataataaactaattgtggcttgtaaatgatttgtatgtgatcctgtcgactaaaatcacttaacaattctacaataagcttctgcatcaaagcctgccgcttgctctatgccggaataacaccaaatggaatctcctcatctcttgcttgttagcgatgtgtctgattcagggcatctgtctttttgttacttttttgtncgtgtcctctcatttgggttttgtaactgcaattttcaaaccaaagttt

SEQ ID NO: 1223 - DNA, 446 bp, Homo sapiens
  misc_feature 424, 427, 438: n = A,T,C or G
ccaggccctccatggtggtgctggggcggataccctcatcctgggtcacagtgatgctcctcttggtgcccttgtcatcatggaccgtggtggtcacaggcacaatctcagcttggaaacagcccttgctctgggctcttgctgccttctgctgggaagccagggcaaaggtatcctgcttctcccgtgaaatgccaaaccgctcagccacattctcagaggttatccccataggaatcaggcaatctctggccttctccttctccatcaagcgcgaagtaatatttccagggttccctctgtcagccagggacatggactccaccccacaggccatgccaatgtcataagacccatttctgatgccacctgctatgctggacctcggccgcaaacacctaagggcgaattccagcacacttgncgncggtatatggntccgactt

SEQ ID NO: 1224 - DNA, 240 bp, Homo sapiens
  misc_feature 212: n = A,T,C or G
ccatgttggcaaaggtgtagtacaggtagtaggcatagggtgggttgtcctcctccacccacgcctcaggcagggggctctccaggttgaagacatggttttcaggcttggactcatcatccacgctgtcaaaaccatccacgtgctctaagaagagatgcagttccgggtggctggcagggtgcacagtggcctcgaacagtggcaggaanatgttctccagcatctcctggaagttgg

SEQ ID NO: 1225 - DNA, 246 bp, Homo sapiens
  misc_feature 50, 84, 112, 207, 219: n = A,T,C or G
aaacttcataaaaatattcatgattttattagtttgaatatttctacaanattcgggtgggcttttcctttaggtgaaaacagntatccactcctgtggccttataactcangaaatgctggggatgcaaacgtgcaaaaggcatggggaagctgcccaggctgagactggagcagctaggagtgtgcttggggaacgggagctganatcccggagcanaaatggtcagccgtgctctggagcagg

SEQ ID NO: 1226 - DNA, 319 bp, Homo sapiens
  misc_feature 181, 182, 230, 252, 260, 275, 277, 290, 302, 312: n = A,T,C or G
cctgaggtctgcggaaggtgggaggaggcagacgccctgcgtggcccatggtcggggcgtccacgccgaggccggcaacaaacgacagtatctcggattcctttttttttaattttttatactttggtgtttcacttcatgctctgaatactgaataaccatgaatgactgaatagtttannccagatttttacagaggatacatctatttttatcattatttggggttngaaaaatttttttttacaccanctaatttntttatttgtcaaagnanataattcttctgngagaaaatgttngcttaaattnatttaag

SEQ ID NO: 1227 - DNA, 268 bp, Homo sapiens
  misc_feature 239: n = A,T,C or G
aagaaggggaggaagtggtggaggaccgagattactactatgacaccttcaaaggagatgactacaatgaggagaatcctactgaacccggcagcgacggcaccatgtcagacaaggaaattactcatgatgtcaaagctgtctgctcccaggaggcgatgacggggccctgccgggccgtgatgcctcgttggtacttcgacctctccaagggaaagtgcgtgcgctttatatatggnggctgcggcggcaacaggaacaattttga

SEQ ID NO: 1228 - DNA, 618 bp, Homo sapiens
  misc_feature 344, 378, 387, 402, 405, 437, 468, 469, 490, 535, 540, 551,553, 556, 579, 602, 607, 611: n = A,T,C or G
ccaggatggtctcgatctcttgacctcatgatccgcctgcctcagcctcccaaagtgctggaattacaggcatgagccaccacacctagcccaatctcagtttcttaaatccgaacttgttaagatatttgaataaaattgatcacaagaatagctatgccttgccaaaatacataattagaatgttaaatgtaggtgaaaaagctttcgactaaactaaacttgaatatcacctggtcaaccactttcaactcattttttaactcttaagagataatttttgttattttgtcttatgactacttttgttttatttaatagcatgaatacaacttttgtctganagccccttcaagtggggatccttgaggctgccanacccattgngggatgctttaccancanccctgtgaaactggctgcccagtacccaacanaacgtgggataaagtggggttcccttccccnnaaaaaactaatgagaattctnttggaatacaagctgatattgcttccatcgggtcattctggaggntttanaagtaaaagtngnagnttttaaaagtttacctgcccggnggccgttcaaaggggaattccanacctngcgncgttctt

SEQ ID NO: 1229 - DNA, 267 bp, Homo sapiens
  misc_feature 229, 243, 248, 251: n = A,T,C or G
aaaaaaattggatgtctttctgagggtctgagaagaatagggcagaagaggaaagggtcactttaggggtctggcttaacccactgcctagatctccaactgaagagctcctttcccatcctcaggggaagagtgcctgtttcaaacggcatccctactacacatataccccccttccctaaaatcttgatgtggcaaacacacccaagaacccacaggaatatgtccntataaatatgtttnttttntanaaaacaatgcacttaa

SEQ ID NO: 1230 - DNA, 291 bp, Homo sapiens
  misc_feature 244, 272, 280, 283: n = A,T,C or G
ccatgcttttcatatttcccgtaacaagtaactctttgtctctctctttcccaataagcaaccccaaactgagggcaatcaggtaaagtcacatggtagctctgtatctcttctctccccagttcagctttgagcccagaacctgccatgaatgggcccagaaggaacagatgagctggaggcccaagtcctgggcctaagggaaatcactgccttataattctcttatggctgcagataagangaaactggacagtctgaactgggatggngaaagaanaangacatgga

SEQ ID NO: 1231 - DNA, 326 bp, Homo sapiens
  misc_feature 224, 231, 254, 265, 273, 280, 281, 292, 305, 308, 317: n = A,T,C or G
ccttcagcaaatactcatagaagctgtctccaagtcctccaactgatacatgatgttgaccccactgtccactactgggattcagatagttaggataaaggccaggccatgttatgggatctcaacgaaggcaaacacctttacacgctagatggtggggacatcatcaacgccctgtgcttcagccctaaccgctactggctgtgtgctgccacaggccccancatcaanatctgggatttagagggaaagancattgtttatnaactgaanccagaanntattttttccncccccaagggggnaanacccccccnggggccccc

SEQ ID NO: 1232 - DNA, 256 bp, Homo sapiens
  misc_feature 218: n = A,T,C or G
cctgctgggaacgggacttctaaaaggaactatgtctggaaggctgtggtccaaggccatttttgctggctataagcggggtctccggaaccaaagggagcacacagctcttcttaaaattgaaggtgtttacgcccgagatgaaacagaattctatttgggcaagagatgcgcttatgtatataaagcaaagaacaacacagtcactcctggcgggnaaccaaacaaaaccagagtcatctggggaaaagtaact

SEQ ID NO: 1233 - DNA, 312 bp, Homo sapiens
  misc_feature 192, 235, 242, 260, 270, 279, 283, 288, 303: n = A,T,C or G
aaaggcagggtctctggcgtcaggaagaattgtattcaactggattccttgtaggaaaaaccggctagaacttgcattcatcccgaactggaagagcaggacggtggtgccctcgctgtgcagctccagagtcaccaggtgggcgccgcagctcccgctggccgaggtcttgttggggttgatgttgagaanccttgtcaccgtcgtgttgtccttcctctcataagtgagggtnagatgcngccccatgcttgacctcngggccgcgancacccttangggngaaantcaaccacactggcnggccgtact

SEQ ID NO: 1234 - DNA, 331 bp, Homo sapiens
  misc_feature 305: n = A,T,C or G
cctcgcaccaggtaccacagaaataagctcagattctcactcagagaatcactcagggtggacgtgtcctctgttacccgagacatgatgttacctgtctggttctgttggaaaaactccgtctcctggcgcaggacagccccaaacacctctccctgcaagtggctgtgcacgtggcccatggtgttgttatagatcccgtcacccacgaactccagcactgcactggctatggtgagaatggacatgagagttaagtttcgagtgaaggtatcggctgagccatcttgtagaatccagtcagngaggcggcccgtaaagaatggaatgg

SEQ ID NO: 1235 - DNA, 380 bp, Homo sapiens
  misc_feature 95, 117, 196, 212, 216, 220, 249, 259, 279, 290, 294, 301,306, 309, 314, 316, 338, 339, 354, 355, 360, 375: n = A,T,C or G
ccagaatgtgcttgccataggtgtacttacgaagagttgcgatgtggggccggatcttatgcatgacgatcttccgctggcctggctcccccacntcaatcatcttctggaccacgnaagttggcatactggtccttcatcatgggtgtataaggcactgtggggaccgtcgttcatggtgcacacctcatcgatnagcacagcgcgctccntacntgangcgtgagtaacacacttctccacaacatnggtcgcaaanttgtgctgactcaatacaantacattgcctnggancctgctncaatnttncttanancctcaggacaaccgggctccannccatgtaggattacnntaatntccatattgatcctntcaag

SEQ ID NO: 1236 - DNA, 372 bp, Homo sapiens
  misc_feature 139, 198: n = A,T,C or G
ggtcgtagtactctctggcattgtaccctttccggtccaaggcctcgacatcctccacccgcaggccgaagatgaagaggttcttggccccggcctcctcggccatctccacgttggcgccgtccatggtgccgatggngagggccccgttgagcatgaacttcatgttgcctgtgcctgaggcctcggtgcctgcantggagatctgctgcgacagatcagcggccgggatcactttctcagccaaggacacacggtagttctccaggaagatcactttcaacctgtcacccacaactgggtcatgattgacgacgtcgccgatggaggtgaccaacttgatgatcagcttggacctcggcccgcgaccac

SEQ ID NO: 1237 - DNA, 102 bp, Homo sapiens
cctacgcagccctctgtgcccagcagaacatctgcctcgactggcggaaccacacgcacggggcctgcttggtggagtgcccatctcacagggagtaccagg

SEQ ID NO: 1238 - DNA, 467 bp, Homo sapiens
  misc_feature 144, 166, 179, 231, 241, 384, 423, 425, 449: n = A,T,C or G
aaaaatttaagtttaagggcaaaaagaaccactactttagagagaatggagatactagcaagtaaaatatatgaaagagctagttggaaaggaagccaagcatggagtagaacgtggggcccgtcagctctaaagggtactgancgttaatggagggcgggagcangaagaaaagtcangacctggcaaaaagatcatcttccctccatatcctttctgaggtaatattangtaaactganacctggaccagagggctcaattatatccatagtcacctttattctgaattaaccatttatcaagagtgcgcctgaaaagagtagaaaaaaataaaggagcccatcaaaaaaaagttccctggcaaagtgggagggaggacatnatgttaggagccctgtttggggaaggaaatgttttccangncattggatggccattttttgtcantgattccaacactgaagg

SEQ ID NO: 1239 - DNA, 264 bp, Homo sapiens
  misc_feature 109, 115, 193, 232: n = A,T,C or G
aaaggaaaaaaaaaatgtgtgtgtggctgtttattctctaatgtgacaaaaacatgaccatccgggaggagaggggctaacggtgcaaccaactgaggctgaaacacanattcanctgaaatgcagcttttgcaaaagcgggggccggcttccctcctagcccttcagcttgctcaccctgtccctgcagctntgaaaaacgcccttccagtaagcggccaaggagcacacnagctcctcccaccagcaaaggggaaggggagg

SEQ ID NO: 1240 - DNA, 176 bp, Homo sapiens
  misc_feature 152: n = A,T,C or G
tttttattttctattcacaaagaaaaagctccagtccatcttttaatttttttgaaaaattcctgacattacagaactaaactgaaatgtattaatattccactcttacatttccatgacaaacagaaaaattcatgagccaaaaaaaaaanccaaaaaaaaaaacccggggaaaa

SEQ ID NO: 1241 - DNA, 301 bp, Homo sapiens
aaaacggtgtgtgttcggaggggtgaaagcattaagaagcccagtgccctcctggagtgagacaagggctcggccttaaggagctgaagagtctgggtagcttgtttagggtacaagaagcctgttctgtccagcttcatgacacaagctgctttagctaaagtcccgcgggttccggcatggctaggctgagagcagggatctacctggcttctcagttctttggttggaaggagcaggaaatcagctcctattctccagtggagagatctggcctcagcttgggctagagatgccaagg

SEQ ID NO: 1242 - DNA, 108 bp, Homo sapiens; identical to SEQ ID NO: 883

SEQ ID NO: 1243 - DNA, 142 bp, Homo sapiens
aaaggagttggaggagagggagggggaggacatggcaccattccagaaaccagcattgttacaacaccatagccagtatatttagtttggcttttcctaacatagaaatcttcaaagctggggaagtggaaaataaagtttt

SEQ ID NO: 1244 - DNA, 559 bp, Homo sapiens
  misc_feature 481, 504, 519, 538, 545, 554, 558: n = A,T,C or G
ccatctacaatagcatcaatggtgccatcacccagttctcttgcagcatctcccacctcagcagcctgatcgctcagctagaagagaagcagcagcagcccaccagggagctcctgcaggacattggggacacattgagcagggcttgaaagaatcaggattcctgaaccttggatcacacctccagatttgcaagagaaaatccacatttttgcccaaaaatgtctattcttgacggagagtctaaagcagttcacagaaaaaatgcagtcagatatggagaaaatccaagaattaagagaggctcagttatactcagtggacgtgactctggacccagacacggcctaccccagcctgatcctctctgataatctgcggcaaggtgcggtacagttaccttcaacaggacctgcctgacaaccccgagaggttcaatctgtttccctgtgtcttggggctctccattgcttcatcgccnggagacttattggggaggtaganggggggagataaagncaagtggccattaggtgtntgtgaanactcagtgngcana

SEQ ID NO: 1245 - DNA, 277 bp, Homo sapiens
  misc_feature 125, 142, 186, 192, 203, 210, 212, 257, 261, 264: n = A,T,C or G
cctaacaaaatggcatacaacttaacagtagcagaccagtgttaaaaagtctggagtcaaggggaaaaggtaaaattggaatgtttccagaatctcacaaaaaaaaaacaacaaacccgatgttntaattgccccaaccatngaaacaaattagaaccttaaataaaggtcaggggttaatgccantactancataggttcancaccaancncaatgttattttactggtttgcctttttcattctgtttttttgtnttgnttngttttgcttttta

SEQ ID NO: 1246 - DNA, 256 bp, Homo sapiens
ccatgacagtgaaggggctgttaggaatatcaacaccaccgaagcgcacatagatcacatatgtgcccggcttggcagctgtgtagaagatgtcataggttccatcttcattctcaatgacatcggcctcgggcctcagtgccatctggggtcagaaccgtgcaggtcactttacccttcccggcagtcttggcatcaaccacaaagcctacttcttcgccagttttcacagtggaggcgattccaggacccgtgg

SEQ ID NO: 1247 - DNA, 550 bp, Homo sapiens
  misc_feature 327, 345, 406, 441, 462, 494, 507, 509, 525, 548, 549: n = A,T,C or G
ccacgaccctttgtactgtcaactctggcttcctttacaagaaactaggagcacttctagcacattccttccttaccctgctctctcaaaaccaccctgacccccatggcccctcctggaaacatggtactcagaaaagcagggaccaccagcggctggcaaagtgtttggggaaaaaaggaggtgcaaagtcagcaagaaaacaaatgcccgctggtcccgccaaggcagggtatgcctagtcccgggggatgttggggggcgggatctgcaggtcggagggctccacaccccagatctcccgtgcatactccgtgatggtccggncactggagaacttgcccnagcaggcgatgttcctgatgaccttcttggtccactccttggggttccggtacagttggtncacctgtgcctggcactgcatgtaggcttcatagnttgcaaacaccttgaacctgncatggtgcatcaacatgttcacgatggtcttnaagcaatctgggntncttgggagaaaaaaancattgctgttctggccccgtctnnt

SEQ ID NO: 1248 - DNA, 108 bp, Homo sapiens
ccatggcccaggtcacccaccccctggtccacatcactgaggaagtagaagaaaacaggacacaagatggcaagcctgagagaattgcccagctgacctggaatgagg

SEQ ID NO: 1249 - DNA, 240 bp, Homo sapiens
aaagactttggatctgaagaacaatgaaatttcctggactattgaagacatgaatggtgctttctctgggcttgacaaactgaggcgactgatactccaaggaaatcggatccgttctattactaaaaaagccttcactggtttggatgcattggagcatctagacctgagtgacaacgcaatcatgtctttacaaggcaatgcattttcacaaatgaagaaactgcaacaattgcattt

SEQ ID NO: 1250 - DNA, 553 bp, Homo sapiens
  misc_feature 506: n = A,T,C or G
aaaaacctgctcaagaccggacacagtggctcatgcctgtaatcctggcactctgggaggccaaggtggggggatcacctgaggtccggggtttgagaccagcctgaccaacaaggagaaaccccgtctccctaaaaatacaaaattagttgggcgtggtggcgcatgcctgtaatcccagctactcagaaggctgaggcaggagactcgcccgaacctgggaggcagaggttaccgtgagccgagattgcgcgattgcactccagcctgggagacaagagagaaactcccgtctcaaaacaaacaaacaaacaaaataacaataaaaaacctgcttaaggtgttaatccaacaaatccatgaaaaactagtaagctgttgtaatggctctgtgacctgtgagacagccatgtctcatgcaaatgtggccctgtccggggtactgactccgtcccccttagagttccccaccaaggacttgtggcttaaggaggcaaatggggtcnggggatacccatgtattaggctgactggaaaactgtggggcttatgt

SEQ ID NO: 1251 - DNA, 246 bp, Homo sapiens; identical to SEQ ID NO: 806

SEQ ID NO: 1252 - DNA, 550 bp, Homo sapiens
  misc_feature 282, 377, 418, 423, 440, 461, 474, 502, 523, 526, 527: n = A,T,C or G
aaaaattaaattctcaggcacaggtactgttaaaatgtggatggcaccctcccaaggattgaaaacacacagctggatcatgcatctggaatgttttcttttttatccaggaaagtgttttctctgactttcttgatatgtgcacatcaccttacacgtggtgcccgagagccccgccatcgccatccccgccctgcatctgcatctgcatctgcgcctgcatccttgcaatcatctcttgcatgcggcggagctcagcttctttttccagcaagatctggnctttattcatgtcctcattctccactttcctgccgcctctcttgagtctctcagaacggaagttttcataatgaaggtcctgggtcacctcctgnagatcctgcatgtgggtgatgagcatgggtctcagcttcanaaagncattgtgctctgggttntccacttccacaacaccccangggtagaggcggnctctgaccttctttcctttggcttcaancaaactgaatggatccactcngannaatgggatgctagccttaaaacg

SEQ ID NO: 1253 - DNA, 245 bp, Homo sapiens
  misc_feature 43: n = A,T,C or G
aaacttcataaaaatattcatgattttattagtttgaatattnctacaagattcgggtgggcttttcctttaggtgaaaacagctatccactcctgtggccttataactcaggaaatgctggggatgcaaacgtgcaaaagcagggggaagctgcccaggctgagactggagcagctaggagtgtgcttggggaacgggagctgagatcccggagcagaaatggtcagccgtgctctggagcagg

SEQ ID NO: 1254 - DNA, 556 bp, Homo sapiens
  misc_feature 397, 429, 452, 458, 467, 499, 502, 510, 513, 530, 532, 538,547, 550: n = A,T,C or G
ccacggctgcttccagctcctccctggagaagagctacgagctgcctgacggccaggtcatcaccattggcaatgagcggttccgctgccctgaggcactcttccagccttccttcctgggcatggaggtcctgtggcatccacgaaactaccttcaactccatcatgaagtgtgacgtggacatccgcaaagacctgtacgccaacacagtgctgtctggcggcaccaccatgtaccctggcattgccgacaggatgcagaaggagatcactgccctggcacccagcacaatgaagatcaagatcattgctcctcctgagcgcaagtactccgtgtggatcggcggctccatcctggcctcgctgtccaccttccagcagatgtggatcagcaagnaggagtatgacgagtccggcccctccatcgtncaccgtaaatgcttctagcggantatgancttaattgngttacaccctttcttgcaaaacctaacttgcncanaaaacaanatnaaattggcatggctttntncgtttntttgtttgnttnggctcg

SEQ ID NO: 1255 - DNA, 494 bp, Homo sapiens
  misc_feature 413, 423, 426, 443, 445, 450, 486: n = A,T,C or G
ccaatgtcaacgcagagccgaggcggtgttgtcacggctaatgtgaaatctcttcccgtggcgcccatcctctgactctgcagtgccagcttggacagattgaggtctctgtggctttggtgaccctgctttaagcattcccaccgtgtcccagctctgctctaggactgcctcccactgcggcccctcacctgacttcagggtatggggagggagggagccagtgctccaaggccagggggctttgctcatgagagatgtcgggcttcctggaggcatcaggctttgagccctgctggggtccaactgacctgggaccacgtgtcgcgcacagatgtgcctcattctgtgcctccttctgtgcctcctaccatgttccctttaactgtgcctcagtgtgggttagggaacanttttgttatngtntcaaagtttattcagtnantttcncttgaggaactaaaccagtttttactttctgtctanaatgatgt

SEQ ID NO: 1256 - DNA, 312 bp, Homo sapiens
  misc_feature 117, 126, 141, 162, 166, 179, 193, 197, 200, 210, 212, 229,231, 242, 253, 270, 271, 278, 282, 287, 288, 300: n = A,T,C or G
aaaagaattaaataaaaacctgagaagtctaacgtgaagctaggactcctgcctgcttcccttcaggcacctgctgtgcctccttctccgcagatgctctggttggaagcctcctgnactggcttntggtaacagcaccanctggacgttgtcatgaaatgncacnagttctgggttgntttctggtctgcantccncanttccctgccntngggcacccgatctcacnanggcacagcaanactaactctgnggagcctcccacgagcnntaaggcntttnctccnncctcttcttgtnagcagactgtga

SEQ ID NO: 1257 - DNA, 441 bp, Homo sapiens
aaaaagacttgtgcacttgcccaggctcaaggatattaaaatctagcacataaagcccattactagaggtagaaatacaggcaatatactattacggcaacaaccatcaattacagttaagaaatttttttgtaacaaccaaatggataatcaaatattgcaacaactcaagtattactgagcaaagtgcatttctacagtattcagtgttgctattcagttttctaacttaaaacagcctatgataactggcagcaaagaaggtccttgcaatagactgcctctgcttgagaacttatgatgtaattattgcatgctgctaatatactatctaaacattaaagatactcctaaaatatttgatggtagactatgattaagacattacactacaaaaaaaccttatgcagaaggaaatcctaactgacgtgcttctgcttt

SEQ ID NO: 1258 - DNA, 287 bp, Homo sapiens
  misc_feature 17, 59, 67, 69, 73, 131, 145, 158, 166, 174, 195, 196, 247,258, 273, 276: n = A,T,C or G
cctgcatgctccgctgnttccgccagcaggagaatcctcccctgccccttggctcaaangtggtggntntggnggggctgttcgtgatggtgttgatcctcttcctgggagcctccatggactacctgatncgggtggcacggangaaccaagagcgngccctgcncaccgttntggagctccggagatgacaanngagcatctggtgaagaacacatatgttctgtgaccgccctgtctccaatangactggggaanggaggggagactatntgngagcttttttt

SEQ ID NO: 1259 - DNA, 339 bp, Homo sapiens
ccacagactcctggaggtcactgagcatctgcaggatgtcatgtgtgggctcctgggatccgtctgcggagactttaggtgccgtctttacaatgttgctcagatcaaccccttgcgattcaaactgctccacggcctctttcactgcctcctctggccccatcgcaaactcctcgatgttctcgcgcacagctgcatcaaaggtctcctgggcaatgcgcttggagaccatcttcgcctgtgttgatgttggcgtgcagccgatagatgctcctgagctgagaggttagggcaaagagagagctacctcaagggtgagcaggcaatggcagggcctgg

SEQ ID NO: 1260 - DNA, 376 bp, Homo sapiens
  misc_feature 118: n = A,T,C or G
ccatggagtctatgagctggccgctcaccccgaagtcacacagcttgatctcccctctagagttcacgaggatgttggagggcttcacatctcggtgcatgatctggtgcttctctcngaggtaccgccaagccccggagaaccgcgatgctgactttccccaggatctcctcgggaatcctcttggcctctttcagcacctggtccagggagccgccgtccatgtgttccatgcaaatgctgatctccccgtcactgtagaaggccccgtagaagcccacgatgtacggcgagttgcattcgtgcaggacctgcagctcgcggatgatctggttccggatggccggcttgatctcaaggtggatcagcttcctgg

SEQ ID NO: 1261 - DNA, 65 bp, Homo sapiens
  misc_feature 20, 35, 46, 52, 53: n = A,T,C or G
tttttttttttttttttttnaaaaaaaccccaaanggccttttttngggggnntttccccccttt

SEQ ID NO: 1262 - DNA, 177 bp, Homo sapiens
ccaccggtgacgacaagaagcgcatcattgactcagcccggtcagcctaccaggaggccatggacatcagcaagaaggagatgccgcccaccaaccccatccgcctgggcctggccctgaacttttccgtcttccactacgagatcgccaacagccccgaggaggccatctctctgg

SEQ ID NO: 1263 - DNA, 560 bp, Homo sapiens
  misc_feature 397, 450, 475, 482, 488, 528, 535, 540: n = A,T,C or G
aaaggatttaacccattaggaagcccatgtttcaatctaagccagaaggagctgcgggacaaggcagtcttcactttgaaggtccctttcctgctccagtccctgggctagggttctagtagaggctggctgccacgtttacatgaggccaccgaagatctaagtccagctaagcccagggaggctcctgcaaaggctgggacctcgggtgctgcgtcctcaaccctctcggtgaccacggctcaaaggagagacctcaagggtgccaggagcacaggtgcctgggctgcattccaggaaagagacctgtccagggaaacggatcaggctgtcgcatggaagcttacgtcagagatggtggttttggggtgatttggacaaattaggttaagtttancaaagctctgaagtagcaagaagcttctcccctggactactgattgaacacanaacaagagatgccccgttggcgtcngactaantcttanaaaagagcaggcccagtcttctcccccagggccttggganctggcangacanacacttgctacttgccctcc

SEQ ID NO: 1264 - DNA, 556 bp, Homo sapiens
  misc_feature 492, 511, 556: n = A,T,C or G
aaagttcaaggactaaccttatttatttgggaaaggggaggaggaaggaaatgatatggtacccagacactgggctaggctgcaactttatctcatttgatactcccagctgtcatgtgagaaaagaaagcaggctaggcatgtgaaatcactttcgtggattattaatggatttaagagggcatcaatcagctcaactcaagatttcataatcatttttagtatttagattgtgcctcaaagttgtagtacctcacaatacctccactggtttcctgttgtaaaaaccttcagtgagtttgaccattgtgctcttggctcttgggctggagtaccgtggtgagggagtaaacactagaagtctttagtacaaaactgctctagggacacctggtgattcctacacaagtgatgtttatatttctcataaagagtcttccctatcccaaggtcttcatgatgccagtagccatatatgataaattatgttcngtgataactttattatcanaaatcacctcagtggtctttccccgcccatgattcacatttgatn

SEQ ID NO: 1265 - DNA, 549 bp, Homo sapiens
  misc_feature 388, 413, 419, 435, 442, 445, 455, 463, 502, 508, 509, 535,546: n = A,T,C or G
aagaaggggaggaagtggtggaggaccgagattactactatgacaccttcaaaggagatgactacaatgaggagaatcctactgaacccggcagcgacggcaccatgtcagacaaggaaattctcatgatgtcaaagctgtctgctcccaggaggcgatggcggggccctgccgggccgtgatgcctcgttggtacttcgacctctccaagggaaagtgcgtgcgctttatatatggtggctgcggcggcaacaggaacaattttgagtctgaggattattgtatggctgtgtgtaaagcgatgattcctccaactcctctgccaaccaatgatgttgatgtgtatttcgagacctctgcagatgataatgagcatgctcgcttccanaagctaaggagcagctggagatttngcaccncaacccgaatggacanggtaaanaangaatgggaanaggcagantttcaagctaagaactccccaaagcagagaggcagactntgattnncacttccagcctggttaaagcttttnaataagaagcnccg

SEQ ID NO: 1266 - DNA, 246 bp, Homo sapiens
aaacttcataaaaatattcatgattttattagtttgaatatttctacaagattcgggtgggcttttcctttaggtgaaaacagctatccactcctgtggccttataactcaggaaatgctggggatgcaaacgtgcaaaaggcagggggaagctgcccaggctgagactggagcagctaggagtgtgcttggggaacgggagctgagatcccggagcagaaatggtcagccgtgctctggagcagg

SEQ ID NO: 1267 - DNA, 143 bp, Homo sapiens
  misc_feature 140: n = A,T,C or G
cctgagtgggggacttgcaagggctgatgggtaacccctcccacctgctgctactccctgccccaaaaagcagcttggctcacaagcctgggcatgcagggcagcacgaggagctgagcagggaagtgtggggggtggangaa

SEQ ID NO: 1268 - DNA, 447 bp, Homo sapiens
  misc_feature 427, 433, 435, 439: n = A,T,C or G
cctctgcctgctggggattactcgatcaaaaccttccttccctggctacttcccttcctcccggggccttccttttgaggagctggaggggtggggagctagaggccacctatgccagtgctcaaggttactggggagtgtgggctgcccttgttgcctgcacccctccctcttccctctccctctctctgggaccactgggtacaagagatgggatgctccgacagcgtctccaattatgaaactaatcttaaccctgtgctgtcagataccctgtttctggagtcacatcagtgaggagggatgtgggtaagaggagcagagggcaggggtgctgtggacatgtgggtggagaagggagggtggacctgccccggcggccgctccaaagggcgaattccagcacacttggcgggacggtactagngggatncnactnggtaccaa

SEQ ID NO: 1269 - DNA, 223 bp, Homo sapiens; identical to SEQ ID NO: 527

SEQ ID NO: 1270 - DNA, 555 bp, Homo sapiens
  misc_feature 366, 476, 492, 512, 513, 536, 542, 544: n = A,T,C or G
ccagtgacgggtgggttggcagctggactggcgtggcatggctagctgccctgggcaccatattccctgcctgtcaccactcctggttgtccaacaaagcaaagtcacaatgacaagatccacagaggggagtctccagctggagatggtgccgctgtcacagggcaccagagcagcaatgtgacagcttctcatggaggcagactctgttcccagtccctacccaaccctggcttgatccttgtcagtgtcttatttctttgccttgcctttatctcagcctggcttcccttccaggcagctctgagtggctcttggtccaggcttgtctccatctctccttcctcttcccaactccctaaactnaggacccagtcactcctgctccttacatacacacacacactaacacacgcacacactcactctcaccctctcccccccacacactcacacacacttccaccctaccttangaaacagggtttcttncatgaaccttattaaacctnnggggaatgaccacggatctgggnccccantntgtctgtgaac

SEQ ID NO: 1271 - DNA, 452 bp, Homo sapiens
  misc_feature 425: n = A,T,C or G
tcctgacttctgctggcatcaagaggtgggagggccctccgaccacttccaggggaacctgccatgccaggaacctgtcctaaggaaccttccttcctgcttgagttcccagatggctggaagggggtccagcctcgttggaagaggaacagcactggggagtctttgtggattctgaggccctgcccaatgagactctagggtccagtggatgccacagcccagcttggccctttccttccagatcctgggtactgaaagccttagggaagctggcctgagaggggaagcggccctaagggagtgtctaagaacaaaagcgacccattcagagactgtccctgaaacctagtactgccccccatgaggaaggaacagcaatggtgccagtatccaggctttgtacagagtgcttttctgtttantttttactttttttgttttgttttttt

SEQ ID NO: 1272 - DNA, 549 bp, Homo sapiens
  misc_feature 9, 15, 58, 109, 118, 124, 136, 196, 218, 230, 262, 267, 289,295, 303, 308, 316, 337, 342, 343, 359, 368, 377, 381, 387,388, 396, 401, 418, 431, 432, 436, 441, 447, 468, 495, 502,503, 532, 538, 541, 543: n = A,T,C or G
ccaggatcntatgcnacaacgcggacaacatcacccgggtgcagagcgacgtgttcanggtggcggagttccctcacggctacggcagctgtgacgagatccccagggnggacctccnggtgtngcaggattgctntgaagactgtaggaccagggggcagttcaatgccttttcctatcatttccgaggcagacngtctcttgagttcagctaccangaggacaagccnaccaagaaaacaagaccacggaaaatacccanagttnggagacagggggaacatctcanctacancacctcanccttnagcacacnctcagatgcatttgggacaantgacnncagagagtttgctctngaaatgcanaagaccatnacanaccttnncaactcanataanagaaacttttatcaccngctcactcccacnnactnccgtngattgntcggggggcgaatttcactancaaccaactcctaagtgggaaaaaaanatgcctnncaccattttgtgaatgctctacactgggnttgttnccntncttcct

SEQ ID NO: 1273 - DNA, 330 bp, Homo sapiens
aaaaacggttatactataaaatctgcttttcacactgggtgataataacttggacaaattctatgtgtattttgttttgttttgctttgctttgttttgagacggagtctcgctctgtcatccaggctggagtgcagtggcatgatctcggctcactgcaacccccatctcccaggttcaagcgattctcctgcctcctcctgagtagctgggactacaggtgctcaccaccacacccggctaattttttgtatttttagtagagacggggtttcaccatgttgaccaggctggtctcgaactcctgacctggtgatctgcccacccagg

SEQ ID NO: 1274 - DNA, 535 bp, Homo sapiens
  misc_feature 241, 314, 389, 398, 409, 426, 443, 451, 453, 454, 478, 486,503, 508, 526: n = A,T,C or G
ccacttgcctaggagagaactcaggcaccaagttaaaaagactcccatgaagaactgccacctacttcccttctttcctgaccagagccacccctagctgtccccctgagatgaagaaagagctcctgagcagcctgactgagtgcctgacggtggaccccctcagtgccagcgtctggaggcagctgtaccctaagcacctgtcacagtccagccttctgctggagcacttgctcagctnctgggagcagattcccaagaaggtacagaagtctttgcaagaaaccattcagtccctcaagcttaccaaccangagctgctgaggaagggtagcagtaacaaccaggatgtcgtcacctgtgacatggcctgcaagggcctgttgcancaggttcanggtccttcggntgccctggacgcggctnctcctgtggctgctggncttcctgnanngcttcctggtgccatgacctcccngtacacangctctttcaggacctcnggccnggtaccacgcttaagggngaattccgc

SEQ ID NO: 1275 - DNA, 262 bp, Homo sapiens
  misc_feature 110: n = A,T,C or G
ccagtctcaggagatgaacacactcttccgcttctggtccttcttcctccgagatcacttcaacaaaaagatgtatgaggagttcaagcagctggctctggaggacgccnaagaaggctacagatatggtttggagtgcctttttcgatactacagttatggcctggaaaagaagttccggctggacatattcaaggattttcaggaggaaacggtgaaggactatgaagctggtaagagccagagttggatctgagtgagg

SEQ ID NO: 1276 - DNA, 289 bp, Homo sapiens
aaaacttacttcaaatttaatttagactcagtaggtaagcaacattcagaatatgaatatgggaatgacttgagtttgagtacagatattcgacaccaaaaaagtcatactacaatgaattcttatgaatgttatcaatgtgggaaagccttctgccgaagttcatcccttattcgacatcagatcattcacacaggagagaaaccctataaatgcagtgaatgtgggagattcttcaaccgacgtacaaaccttactaagcatcaaaaacttcatgctgaagcaaagg

SEQ ID NO: 1277 - DNA, 90 bp, Homo sapiens
  misc_feature 72, 75, 83: n = A,T,C or G
gtacaagctttttttttttttttttttttttttttttttttttttttttttttttttttttttttttttttnttntttttttncctcttt

SEQ ID NO: 1278 - DNA, 509 bp, Homo sapiens
  misc_feature 285, 329, 349, 378, 425, 449, 454, 464, 486: n = A,T,C or G
cctgtcttgttcacagcgtgtctctcccctgctgaagctgctgttggaaaggtacgcctggatggtggcatcatggagcgttacggtcacgttgttcatgtggacctgggtgccactaacacatctgtattttttatctatatctgccctgatgtcagttatagattccacagtcttgatttctttggagctcgcattggggaaaaggtgtgtgtctgacaagttataaacaaaactcatgagctggacgctgtaacgtgttgcatttctcgtgaaattgggagngagtgtatgtcctcttccaaaagcaatcacgagattggggtcanaagtgttctcttttccacangagctgcggttgagcaccactgtggaatntgatggcaggtcaaaggtcatgttcttatggccactcttggtgtccntagttcactgagaaaggcagcatnaaaanttggacctgncccggtggccgctcaaagggcnaattccacacactttcggcccgt

SEQ ID NO: 1279 - DNA, 381 bp, Homo sapiens
aaagttgctttgctggaagtttttataaggaatctcagattaaggctgacttcagactttgtttgtagtacctgtgggtttattacctatgggtttatatcctcaaatacgacattctagtcaaagtcttggtaatataaccaatgttttcaaatgtattctgtcatacaaagagcagatttttattgaacttgtgcaataactatattaccatacaatataaatattcatgaatagtttcccaagtctggagcgaccacatagggagaaaatgtaaatgtctcaatttttgttcacaaaagtatattttatcaaattgctgtaagctgtggatagcttaaaagaaaaaaagtttcctgaaatctgggaaacaagacattt

SEQ ID NO: 1280 - DNA, 120 bp, Homo sapiens
cctccctgctgccttaaaaggacagacatttcaaagtccataagttatatggtaaatctctctacttctggcttctggtagggtttttgtttttgtttcgcttttttttttttttccctt

SEQ ID NO: 1281 - DNA, 327 bp, Homo sapiens
aaatacctcaaaaacaggacatcatgacaacttcagtaaagtagattccatgagggtctgatacctgcaggttgtccgtctgatgacatacttgaccttgaaaaatctggggtcattttgtttttcattcttcacaagttaagatagcggaacgccgaaaggaaggagcgtagttggctgtatttcatgtttaagttttgcttttgaataaaatgtgaatttcctatgcccatctcattgagctttctcagtcattgttgctgtcatttgaaatgactccctcaaaacctagttttattagccagctgcctctgctgtagtacatgg

SEQ ID NO: 1282 - DNA, 432 bp, Homo sapiens
  misc_feature 105, 108, 131, 146, 150, 153, 184, 199, 226, 228, 230, 297,314, 320, 344, 352, 358, 377, 389, 401, 403, 422, 423, 425: n = A,T,C or G
aaaaaaaattataaccttgattgcttattacaaaaaaattcagtacaaaagttcaatatattgaaaaatgcttttcccctccctcacagcaccgttttatatatngcngagaataatgaagagatttgctngtcctagatggggcnaatnttnaaattacaccaagacgcacagtggtttatcnaccctcccctcctcntaagaacttaaaaaaaaagaaaaaacncncntaccaaaaaagtcaaaaaatttgaggaaccccttccaaacagtacacagttattaagttcagtgtcnataattcacatcttgcnacaaantgtttggacatgatttcttttacnaaactttnagtgcnaaaaaggaaatcaaggccnttagatcagcancttaaaaattcncntaaaggaaaatataagaanntntttgtgc

SEQ ID NO: 1283 - DNA, 183 bp, Homo sapiens
ccttcgcagattatgttagcaccatgtgatggggcccgtacctcacagtctcatgctcggtaccatcagcttgcaggggctgaagcatgggctgcccagaaccccaaccaccagttctatctttctctttctgtcaccttttttctcttttttccttcttcccttgcactgaggtcctggagg

SEQ ID NO: 1284 - DNA, 261 bp, Homo sapiens
ccagggctaccttatcaaggacggcaagctgatcaagaacaatgcctccactgactatgacctatctgacaagagcatcagccctctgggtggccttgtccactatggtgaagtgaccaatgactttgtcatgctgaaaggctgtgtggtgggaaccaagaagcgggtgctcaccctccgcaagtccttgctggtgcagacgaagcggcgggctctggagaagattgaccttaagttcattgacaccacctccaagtttgg

SEQ ID NO: 1285 - DNA, 222 bp, Homo sapiens; identical to SEQ ID NO: 676

SEQ ID NO: 1286 - DNA, 479 bp, Homo sapiens
  misc_feature 349, 431: n = A,T,C or G
aaaatattttgccaacccgaaggaaagatgaaaatgccttacagccaaagattactttataatgtggttcatctctctttagcaattttgcttagaagagactgaattgggtttttatttgctttttgatatccaaataatgtttttcattttttatttcctttataagtggaaataacattacagatcttgtggaaaaaaatcactttccttctcttttcctcgtgatcccattctaaatacgaacaaatctctatgctttcttacacttttaggaaaggaatcactctcaattctgcaagttgttctattttcaagaggtgtaggtgtgctaagaatgtgattccangactgccttttttctccttgctctgttgacattcctaacacatcttaaagacaatgaaagcattctaaatgaagacacaatngcatttattttatccaatatgcagataagtctaagaaaactatgaaca

SEQ ID NO: 1287 - DNA, 310 bp, Homo sapiens
cctgcagggcacagaagcagctgtgcagattgtccagccgaggagcaaagatgaactcatcataggcaccacccaagaccgcaggctgggtgtctgcaaggcagagctccatctccactatgtccttggggctcagccccagatgggcacagagcagggacatgaggaccgaatggtgccgctcatccacagcattgagaggccctggctcaggagtccccttctccagctcctcctggatggctgtggcaagaatggggactagatgcatctctgtgttgggcccaaagttctcgttgatatttcgctg

SEQ ID NO: 1288 - DNA, 528 bp, Homo sapiens
  misc_feature 423, 430, 498, 506, 511: n = A,T,C or G
ccaaagctgtagctgagggaatacctaaacttcgaattgaagaatgtgctgcccgaagacaagctagaatagattctggttctgaagtaattgttggagtaaataagtaccagttggaaaaagaagacgcctgtagaagttctggcaattgataatacttcagtgcgaaacaggcagattgaaaaacttaagaagatcaaatccagcagggatcaagctttggctgaacattgtcttgctgcactaaccgaatgtgctgctagcggagatggaaatatcctggctcttgcagtggatgcatctcgggcaagatgtacagtgggagaaatcacagatgccctgaaaaaggtatttggtgaacataaagcgaatgatcgaatggtgagtggagcatatcgccaggaatttggagaaattaaagangataacntctgctatcaagagggttcataaatttatggaaccgtggaaggtccagacctcctcttcttgtatcanaaatgggnacaanaatgggacctcggccgc

SEQ ID NO: 1289 - DNA, 383 bp, Homo sapiens
cggccgaggtaaatactgggggccattaagagtggatgtagctaagagcttagctaacattgccttttcactctatttttctcagatattgtaagcattctgtttttcaatattgtagttaattttttgggctttcaacagcagccctagtaatggtggagttgttaattaatgtgtatattgtactgaatttctgtcagttaaggggttcactgctttggtggaaattggtggaaattgctagcaggttccacgatgtttatttttttctccatgttgtatatcattaccatttcacatacgcgtttctatttttcttcctctcctcctgatctccttaaaaatgaatctagagttggtggctttttccccctcctctttgg

SEQ ID NO: 1290 - DNA, 376 bp, Homo sapiens
ccaggaaatgtcaccgaagtgggacttccatatgcaggatcagcgttcacagtagcacaattctaaccaagttcaagggaaaacaaactctgtctcacacaaacatgggaatgcaaaattgttgagccctagccatcactgtctcttaacataatttgctatcaaaaagacaaacgaaatttagtcacggacttttgggtgcctattcagctgcacccgattccaggggcagcttagtgtgctttttcattacaaaaaataaagacattaaaaatgcaaaacaaatgacctggaggaagaggagtgtttggacccacgcagttgtcttggttgtaaacagtgaacattgtgctttgttgtctcatttagatggagg

SEQ ID NO: 1291 - DNA, 377 bp, Homo sapiens
gagtgctgggactgtggagctggatgaccagatccaggccaatctccccgatgagcaagtgctctcagaagaggagattgacgagaacttcaaggccctcttcaggcagctggcaggggaggacatggagatcagcgtgaaggagttgcggacaatcctcaataggatcatcagcaaacacaaagacctgcggaccaagggcttcagcctagagtcgtgccgcagcatggtgaacctcatggatcgtgatggcaatgggaagctgggcctggtggagttcaacatcctgtggaaccgcatccggaattacctgtccatcttccggaagtttgacctggacaagtcgggcagcatgagtgcctacgagatgcggatgg

SEQ ID NO: 1292 - DNA, 473 bp, Homo sapiens
  misc_feature 240, 241, 242, 255, 296, 373, 385, 441, 448, 452, 457: n = A,T,C or G
ccttctccaggccaggaagggccccttggaattaggcccacctgtctagatcctctcctcagtggtgggtcctgggctgaaaccagcttccacatcatacccccaaaggaagaatgggggtctttctggaatggaagacgctgacttcaagcattcttcaaattactctcgttccccagctgagctttgttgctgagggggttggggacaagccacaggggcacttgcatagcaggggannncaatggggataangcatatggtgaggacaggggagaaggggaagggcatcatanctgcaggtgaagggggcctccaaaaggcagctcctcttccccctcatcccctcaaattgctgctgggttgaggagtnagactgaggcantataatacccttccccatccttaactctagaacccccgtttggttggggaagaagngggaacntttnggaanctatggaaaggaactt

SEQ ID NO: 1293 - DNA, 536 bp, Homo sapiens
  misc_feature 320, 458, 461, 491, 502, 503, 505, 520, 523, 534: n = A,T,C or G
cctggtctccacgagctccgtgtcctgggtctggtcctccccatcccgctgccaggtcagtgtgatctccgcagggtagaggctcagggcccagcacctcagggtggcctcatggtcagagacagcgtggtgagtcatatgcgtcctgggggggtctgtcaggaggagtcagaacattcaggcattttgcatctgtaatgggacactcctccagcacacatgtggctatcttgagaatggacaggacacctgggatgggaaagggagcacagaacccagacaccagcctggacacaggcacctgggataatctcctattncgtggaaaattctagtccctgaagagggaacagcgacttctggtcctgacctgagtggaggctgagggacccaaaaatgctggactcagacccccacacacattgagtgtgaagcaaaaaacaaggaactcgggccgnaancacccttaagggcgaaattcaacaccactntgcggccgttnncnagggatcccaacttnggnaccaactttgngt

SEQ ID NO: 1294 - DNA, 425 bp, Homo sapiens
ccattttaaggtcttcggcagagcagctccccgactccagcccgcaagccatgcccatccgcttcagcacttctatgtcatcgtggatttcaaatgtgttgtcaaaattaaacagatactcaaatttgtcattggagatgctgcagtcgatgaccgtcttcttgctggtgttgacgatgatgaagggcaggtggatgactgagttgggtggcggtggccggctggcctgctgctccgcatgccggtttctctgcaccaggttcttgaaggcaatttgctgtagaataagttcttgaagttgagactgtttctgttttattctttcaagtctcctctgtctttccacctctaagttctgacattcctgagccgagttggtgggcagaccaatccacttgatctccttcttctccttggagatgatg

SEQ ID NO: 1295 - DNA, 325 bp, Homo sapiens
  misc_feature 234, 243, 268, 295: n = A,T,C or G
aaaccttaaattaaaaaaagaaaacattttcacacagaagaattatctgctttgagaaataaagaaattagaaggtgtaaaaaaaaatttttcaaaccccaaataatgataaaaatagatgtatcctctgtaaaaatctggactaaactattcagtcattcatggttattcagtattcagagcatgaagtgaaacaccaaagtataaaaaattaaaaaaaaaaaggaatccganatactgtcntttgttgccggcctcggcgtggacnccccgaccatgggccacgcagggcgtntgcctcctcccaccttccgcaaacctcagg

SEQ ID NO: 1296 - DNA, 314 bp, Homo sapiens
aaagtaatcaacctctctgtccttccattagtctggatcgtctaaagattgttttatttttagaggctcatccggtcagatgttagtgatgtgaaatttcaggccaggcgtgacgtcagcgtggcatttgaaacaagctccatgttgcccttagtgctgtctgaccgaagcctgtctgtcctcagatataaagatgaagcgcagctgtataaagaagagcacctgaggaatcggcagcaccctcactgctacgttcagtacatgatcgccatcatcaacaactgccagaccttcaaggaatccatagtcagttt

SEQ ID NO: 1297 - DNA, 204 bp, Homo sapiens
ccaacatgacgaaaccctgtctctactatggaaattagctgggcatggtagtgcatgcccgtaatcccagctactcgggaggctgaggtgggagaatcacttgaaccctggaggtggaggttgcagcgagcccgagattgcgccactgcactccagtctggtggacagagtgagactccatctcaaaaaaaaaaaaaaaaaaaa

SEQ ID NO: 1298 - DNA, 539 bp, Homo sapiens
  misc_feature 231, 238, 334, 344, 418, 480, 508: n = A,T,C or G
cctttgggaaaggtgggagagctagaggaataattaaagctggtggaactcagttggagtttagaaagcttcccataaaatgcctgcttgatgctgagttgggaggggagagaagaaggctccagaggctcactgagccccttccctggctctcggggtaatttccagaagggcaagtccatgacaaagggcatcccttccaagtgacccaccagttccaggggagtatgnccagtanctttcctgttctcggcatttgccttaagaggaccccccacaaaagtcttctcattcttgacgctgccaacaaaggcatgtggctttggagcccagncttcccttgnagtctgtaccccaccagacatggagtttgtgcttggtcccaacttcccactgggaaaaactggagggatctcancaggaagaggcatcgggtccgcaggacctgcccgggcggccgctcgaaagggcgaattccancacactttgcgccgttactggggatccnaacttggaccaacttggcgtaatcatggcct

SEQ ID NO: 1299 - DNA, 512 bp, Homo sapiens
  misc_feature 385, 394, 400, 458, 474, 485, 491, 492, 507: n = A,T,C or G
ccttgcttaaagctcagaagtggtttaggcatttggaaaatctggttcacatcataaagaacttgatttgaaatgttttctatagaaacaagtgctaagtgtaccgtattatacttgatgttggtcatttctcagtcctatttctcagttctattattttagaacctagtcagttctttaagattataactggtcctacattaaaataatgcttctcgatgtcagattttacctgtttgctgctgagaacatctctgcctaatttaccaaagccagaccttcagttcaacatgcttccttagcttttcatagttgtctgacatttccatgaaaacaaaggaaccaactttgttttaaccaaactttgtttggttacagttttcangggagcggnttcttncatgacacacagcaacatcccaaagaaataaacaagtgtgacaaaaaaaaaaaaaccnccaccttaatggctcntgttccaaaanacactnngagggtttttttaanactgg

SEQ ID NO: 1300 - DNA, 549 bp, Homo sapiens
  misc_feature 287, 448, 477, 517, 521, 542, 548, 549: n = A,T,C or G
ccaaggacgtggcgtccctcagttcccagctccaggacacccaggagctgcttcaagaagaaacccggcagaagctcaacgtgtctacgaagctgcgccagctggaggaggagcggaacagcctgcaagaccagctggacgaggagatggaggccaagcagaacctggagcgccacatctccactctcaacatccagctctccgactcgaagaagaagctgcaggactttgccagcaccgtggaagctctggaagaggggaagaagaggttccagaaggagatcganaacctcacccagcagtacgaggagaaggcggccgcttatgataaactggaaaagaccaagaacaggcttcagcaggagctggacgacctggttgttgatttggacaaccaggcggcaactcgtgtccaacctggaaaagaagcagaggaaatttgatcagnttgttagccgaggagaaaaacatctcttncaaataccccggatgaaaaggggacaaaacttgaaggcanaaancccgggagaaaggaaaccaanggcccnn

SEQ ID NO: 1301 - DNA, 532 bp, Homo sapiens
  misc_feature 473, 503: n = A,T,C or G
ccacctaactgctgatgtacaagtcttccccaggccagaaccttttgttgtagatgaagaaattgatcctatccctaaagtcattaacacagatttggaaatagtgggatttattgatatagctgatatttcaagtcccccagttctgtccagacatctggtcttacctatagcacttaacaaagaaggtgatgaggtgggtactggcatcactgatgacaatgaagatgaaaattcagccaatcagattgcaggcaaaatacccaacttttgtgtcctgctccatggtagcctaaaaatggaaggaatggtagcgattgttcaattaggtcctgaatggcatggaatgctctactcccaagctgacagcaagaagaaatcaaacctcatgatgtctctctttgagcctggcccagaacctctcccatggctagggaaaatggcacaattgggtcctatttcagatgctaaanaaacccttatggcgaggatgacaataagangtcattccccctgcagcccaaaacaaacc

SEQ ID NO: 1302 - DNA, 273 bp, Homo sapiens
aaacccctcccccagcttgcaaaagaagacactgaggtccgaaggaattaagtgattagcccaagatcggagcagctattaaaagtggtgaagcagggctggaggaggagccctctattccaagtggaatgttctttaccccaaattaccacgaccattcaccccctccaaacgtgtctttcttgtaagcaaaattcatctccagaaaggcagctttttggtgttttctatgttggaagtttggcgtttcttgggtttcaaatttggggaggc

SEQ ID NO: 1303 - DNA, 281 bp, Homo sapiens
  misc_feature 277: n = A,T,C or G
aaatatccacagtactcactttttccaaatgatcctagtaattgcctagaaatatctttctcttacctgttatttatcaatttttcccagtatttttatacggaaaaaattgtattgaaaacacttagtatgcagttgataagaggaatttggtataattatggtgggtgattattttttatactgtatgtgccaaagctttactactgtggaaagacaactgttttaataaaagatttacattcctaaaaaaaaaaaaaaaaaaaaaaaaaaaggntttt

SEQ ID NO: 1304 - DNA, 315 bp, Homo sapiens
ccaagctctcaccagccaatcagcggaaatgtgagcgtgtactgctggccctattctgtcacgaaccctgccgccccctgcatcagctggctaccgactccaccttctccctggaccagcccggtggcaccctggatctgaccctgatccgtgcccgcctccaggagaagttgtcacctccctacagctccccacaggagtttgcccaggatgtgggccgcatgttcaagcaattcaacaagttaactgaggacaaggcagacgtgcagtccatcatcggcctgcagcgcttcttcgagacgcgcatgaacgagg

SEQ ID NO: 1305 - DNA, 180 bp, Homo sapiens; identical to SEQ ID NO: 890

SEQ ID NO: 1306 - DNA, 184 bp, Homo sapiens
cctccaggacctcagtgcaagggaagaaggaaaaaagagaaaaaaggtgacagaaagagaaagatagaactggtggttggggttctgggcagcccatgcttcagcccctgcaagctgatggtacccgagcatgagactgtgaggtacgggccccatcacatggtgctaacataatctgcgaagg

SEQ ID NO: 1307 - DNA, 354 bp, Homo sapiens
  misc_feature 303: n = A,T,C or G
ccaatgtggttggtcttcagcttgcagttagccaggttccataccttgaccagcttgtcccagccacaggagacgatgatagggttgctgctgttgggcgagaagcggacacaagacacccactctgagtggctctcatcctggacagtgtatttgcacacacccagggtattccatagcttgatggttttatctcgagatccagagacaatctgccggttgtcagaggagaaggccacactcagcacatccttggtatggcccacaaatcgcctcgtggtggtgcccgttgtgagatcccanaggcgcagggttccatcccaggagcctgagagggcaaactggacctcggcc

SEQ ID NO: 1308 - DNA, 489 bp, Homo sapiens
  misc_feature 460, 465: n = A,T,C or G
ccatgcttttcatatttcccgtaacaagtaactctttgtctctctctttcccaataagcaaccccaaactgagggcaatcaggtaaagtcacatggtagctctgtatctcttctctccccagttcagctttgagcccagaacctgccatgaatgggcccagaaggaacagatgagctggaggcccaagtcctgggcctaagggaaatcactgccttataattctcttatggctgcagataagatgtcctggacagtctgaactgggatggagaaagtagcatgacagggacccggggagaattttcctgcctcttccctccagaggggatagtgggacaccttgagctggcctgggagacctctctaaaggtcattgtgataaaaatagagcttgtctgggaagggatggaaaacagctgctcctgcctgggacttggtgccagggagccggatggtcangccantgcctggacatgcgacacaggacc

SEQ ID NO: 1309 - DNA, 304 bp, Homo sapiens
  misc_feature 146, 233, 289: n = A,T,C or G
gtaagagacaggcagccgccgctgctgcatttgcttctcttaaaactttgtatttgacgtcttatttccactcgaaggggaactggtcttaattgcttgatgaagagcaggagactcatttatgtgagtcttttgagtgaccattntctgggtcactcccatttaactttccctaaagcccatttgaaggagaggtcgcacgagctgctccacaacctctgaatggggatggnatgggtaatgatgcttgagaacataccaagccccactggcatcgcccttgtctaantcattgactgtaggt

SEQ ID NO: 1310 - DNA, 134 bp, Homo sapiens
ccagactgcgttccgacaggcagcacaccgcctcgtagcagccgcgcaccgggctcagcgccttcatgctggggagtgagtccagaggtgccccaaagagaaagaaaaccagaagaagtcccgctacaagtgac

SEQ ID NO: 1311 - DNA, 305 bp, Homo sapiens; identical to SEQ ID NO: 470

SEQ ID NO: 1312 - DNA, 154 bp, Homo sapiens
cttaaagcagctgacttcccagcagcatgcgattcttattgaccttgggcgaacccttcctacacacccatacttctctgcccagcttggagcaggacagctatcgctttacaacattttgaaggacctgccccgggcgggccgctcgaaaggg

SEQ ID NO: 1313 - DNA, 526 bp, Homo sapiens
ccaacggggccctcaaagtctccgtctggagtaaggtgctgcggagcgacgcggcctgggaggataaggatgaatttttagatgtgatctactggttccgacagatcattgctgtggtcctgggtgtcatttggggagttttgccattacgagggttcttgggaatagcaggattctgcctgatcaatgcaggagtcctgtacctctacttcagcaattacctacagattgatgaggaagaataaggtggcacgtgggagctcacgaaggaagggtttatgacctcttttgccttgttcatggtcatttggatcatcttttacactgccatccattatgactgatggtgtacagctcccaagtgctccctatccagtccaaaggaccctcttgattacagcacaggaacttgatcgttggggaaccccagccccttggaacttggaaacccgtgtttcctggaccgcgaatcatgtgttgggcatcagtgttttctgcaagggttgtgacctgaaactttttacct

SEQ ID NO: 1314 - DNA, 442 bp, Homo sapiens
  misc_feature 387, 435: n = A,T,C or G
ccatgtcagatgtttggggaagggactctattttccagacatttcagatagccatcccgggctcacctgaggagtgctggcaaagacaagagtcccctgaatgcacatatggtctaagcgtaccttgagaagtcgtgaacatttccccagaaaagtgaagaccctagagtcccctcttttgcatttgctgtcgccagatggtgtcttcagcagtgaagcggcatttcctttaacaatctgtgatttcctaggatgctcagagaaggctgggtaatgacagaccaacccaccccaaggaaatcctattcaagtctaatggctaagtgaggagccaatggcttctttgaacctaaaactggctcctcctcaaccacagctctggcacangtatgcttcatacaaagagaactacttccccagacacccgctggtganaagctgg

SEQ ID NO: 1315 - DNA, 505 bp, Homo sapiens
  misc_feature 435, 462, 496: n = A,T,C or G
cctgccgtgccccgttttgtgggcctgtacttgaaacactgaacgtgatgtgtccttcactcacccgcagcactttaatccccacaacagccctgtgaggtaggaatcaccaccattcccccgactcatattacagatggggaaaccgagacacacattcaacaaagcgcgcatcacatggggagttcagggttagcctggagtacgaacacacgttctccccatggcccagtcagcggcccacctggcctcttcccctccctttagtaaccccatcagcagcagcataaaaatctaacccttcattttgctgaaagcccctgcagatgacagtttccttcctatcatgtctgcagagctccaaggctgggggcgatgttgaggccgaagccagccacagtgcctcaactgtgcctttcctggagagcgggtggncgcccccagcacatcccctggcacacnggcttgcataacaaaattcttgtaccgccatctntacacaaga

SEQ ID NO: 1316 - DNA, 574 bp, Homo sapiens
  misc_feature 150, 194, 209, 290, 301, 327, 340, 344, 348, 357, 370, 384,393, 401, 407, 424, 438, 449, 457, 469, 471, 478, 480, 489,493, 498, 501, 504, 510, 516, 524, 530, 538, 561, 563: n = A,T,C or G
ctagtgccaccggaatgaagaacagtttaactctacagccccctgctctgcttttcccttcagttctgccatttcctacgtcatctggggctacttcattttcttctgtgcctcggtttactcaactgtgtaaagggagatggcggcagnacagctgtcccctccatccatggtttttctttccatggtttcanttacccgaggtaaantggggtctgaaaatattaaatggaaaattccagaaatgaacaagtcataagttttgaactgcatgctgttctgagtaacgngatgaaacctnccaaggttctactccgaccatcccangaagcgactcctncctntgtncagcacctncacagtgtagacngcgccccctcgttngtcactcancagcccgnctcggngatcagaacccactgtngtccgtacaggcangggcttggtgncttgagtnaaaccccttaantnactttgngnaatgggttngcanaaatnccnccnattagnacatgnctcggcantatttngtaccacntggggcctatttttaattaagtnantcatggctagg

SEQ ID NO: 1317 - DNA, 541 bp, Homo sapiens
  misc_feature 512, 519, 533: n = A,T,C or G
aaatcatttatctggatttttatgttttattagcattttcaagaagacggattatctagagaataatcatatatatgcatacgtaaaaatggaccacagtgacttatttgtagttgttagttgccctgctcctagtttgttagtgcatttgagcacacattttaattttcctctaattaaaatgtgcagtattttcagtgtcaaatatatttaactatttagagaatgatttccacctttatgttttaatatcctaggcatctgctgtaataatattttagaaaatgtttggaatttaagaaataacttgtgttactaatttgtataacccatatctgtgcaatggaatataaatatcacaaagttgtttaactagactgcgtgttgtttttcccgtataataaaaccaaagaatagtttggttcttcaaatcttaagagaatccacataaaagaagaaactattttttacctcggccgcgaccacgctaagggcgaaatccacacacttgngggccgntctagtgggatccnaactcggg

SEQ ID NO: 1318 - DNA, 503 bp, Homo sapiens
  misc_feature 354, 444, 455, 463, 465, 473, 478, 491, 495: n = A,T,C or G
ccttcgtgaactgtgacgagaacagccggcttgtctccctgaccctgaacctggtgaccagggctgatgagggctggtactggtgtggagtgaagcagggccacttctatggagagattgcagccgtctatgtggcagttgaagagaggaaggcagcggggtcccgcgatgtcagcctagcgaaggcagacgttgctcctggtgagaaggtgctagactctggtttccgggagattgagaacaaagccattcaggatcccaggctttttgcagaggaaaaggcggtggcagatacaagagatcaagccgatgggagcagagcatctgtggattccggcagctctgaggaacaangtggaagctccagagcgctggtctccaccctggtgcccctgggcctggtgctggcagtgggagccgtggctgtgggggtggaccttcccnggcggccgctngaaagggncnaatttcanccacntgggggcccgtantatnggatccaa

SEQ ID NO: 1319 - DNA, 484 bp, Homo sapiens
  misc_feature 412, 431, 436, 446, 450, 466, 476: n = A,T,C or G
aaagcaaacattattgcttctgctatagcagagtggagatttggctgagctggtaagaacctcagtgagaaggtgtcttagcaatgaaagggctgaatccgagattcctctagatgaaaaataaggggaatggtcaagtaaattcctggtactggttctttgctgccctgtaatcaatatggcatctcacccccgacaaccaagccagccacagagagaagtggggttcccagggaaaggggtcggctgaccaccctgacggagctggtgagcacaggtgagctctacctcatttgtctctcattcctcaaagtcttctgtggtttggcttcagtgagggcaaaagaagggagactggagtgaaagtgaactctgcctttacctcggccgcgaccacgctaagggcgaattncaacacacttgcgggccgntctantggatcccanctcnggacccaacttggcgnaatcatgggncataactt

SEQ ID NO: 1320 - DNA, 425 bp, Homo sapiens
  misc_feature 264, 269, 319, 335, 339, 351, 359, 370, 377, 379, 383, 391,394, 398, 408, 413, 419, 421: n = A,T,C or G
cctctgcctgctggggattactcgatcaaaaccttccttccctggctacttcccttcctcccggggccttccttttgaggagctggaggggtggggagctagaggccacctatgccagtgctcaaagggtactgggagtgtgggctgccttgttgcctgcacccttccctcttccctctccctctctctgggaccactgggtacaagagatgggatgctccgacagcgtctccaattatgaaactaatcttaaccctgtgctgncaganaccctgtttctggagtcacatcaatgaagagggatgtggggtaaaaagancaaaaaggcaaggggngctntggaacatgttngggtgganaaagggagggngggaacntncccngggggggnccnttcnaaaagggggnaaatncaaccnanctgg

SEQ ID NO: 1321 - DNA, 384 bp, Homo sapiens
  misc_feature 263, 280: n = A,T,C or G
ccaggcgctccttgtcggcatcagggagggtggccttgaactgctcatgggctgtggtcagtccctggatctcctcaatggtgtgcacaatgaaggtgtcctgcaggtcctccatggccccctccatccagttgttgaagggtgcagcccgcttggcatactccaagtacagctggtcaatggtctccagcagtttctcggtccgctccagagcttcccttcgcttctgagttagggcccccagattgtcccactggtcacanatcttttggcaacgggngttgacactgggtgagtcataatagtccagctcattgagctcctgtgcgatagcggcaatctgctccacacggtcctggtgggcagccaggtcactctcgaagg

SEQ ID NO: 1322 - DNA, 112 bp, Homo sapiens
  misc_feature 83, 91, 97, 109: n = A,T,C or G
agctttttttttttttttttttttttttttttttttttttttttttttttttttttttttttttttttttttttttttttttnaaaaaaanaaaaantttttttttttnggg

SEQ ID NO: 1323 - DNA, 287 bp, Homo sapiens
  misc_feature 131, 144, 240, 245: n = A,T,C or G
cctgcatgctccgctgcttccgccagcaggagaatcctcccctgccccttggctcaaaggtggtggttctggcggggctgttcgtgatggtgttgatcctcttcctgggagcctccatggtctacctgatncgggtgggcaccngaggaaccaggagcgtgccctgcgcaccgtctggagctccggagatgacaaggagcagctggtgaagaacacatatgtcctgtgaccgccctgtcnccaanaggactggggaagggaggggagactatgtgtgagcttttttt

SEQ ID NO: 1324 - DNA, 325 bp, Homo sapiens
gcagcctgtcaaggtgcttgttgggaagaactttgaagacgtggcttttgatgagaaaaaaaacgtctttgtggagttctatgccccatggtgtggtcactgcaaacagttggctcccatttgggataaactggggagagacgtacaaggaccatgagaacatcgtcatcgccaagatggactcgactgccaacgaggtggaggccgtcaaagtgcacagcttccccacactcaagttctttcctgccagtgccgacaggacggtcattgattacaacggggaacgcacgctggatggttttaagaaattcctggagagcggtgg

SEQ ID NO: 1325 - DNA, 308 bp, Homo sapiens
cctcctctcagagggcgcatcccaggcagaggagactggcctgggtgatcgttacctccacggcccagtagagtgtggaaaaacatgaggtgcccacagacaatggctgccagcgagtaaagggaaagaaaccctgaggtaccatgattcttttctcttacttcctcaaatgctactgatctctccccaagtacaggctcaacagaaaaatacagtggtttgaggaccccaagaagtcagcacacaggccaggggccagctccaggctgggtctgtctctcccaccttgggaaacccagcgctaaaac

SEQ ID NO: 1326 - DNA, 242 bp, Homo sapiens
ccagccagcattccagcccttcagtgttcttaggaatggctctgtctgaaaaatggctttgcagggatgggtggggcagggaggctgtgggaagagggcagagtctcaggacaccagagtccagctgcccatctgagtggtgcttttgtaaggcatcacacttgaggccactgtgaggggctgagcttctttcccaaccatggatgggggaagggcaagatggaccctgggttccagggcta

SEQ ID NO: 1327 - DNA, 545 bp, Homo sapiens
  misc_feature 177, 379, 462, 502, 507: n = A,T,C or G
cttcgactggctgcttggggagattgagtccaagttcaaccaagccattgcgcatcccggggaaatggtgggggctctggctgcgcagtcccttggagaacctgccacccagatgaccttgaataccttccactatgctggtgtgtctgccaagaatgtgacgctgggtgtgccccnacttaaggagctcatcaacatttccaagaagccaaagactccttcgcttactgtcttcctgttgggccagtccgctcgagatgctgagagagccaaggatattctgtgccgtctggagcatacaacgttgaggaaggtgactgccaacacagccatctactatgaccccaacccccagagcacggtggtggcagaggatcangaatgggtgaatgtctactatgaaatgcctgactttgatgtggcccgaatctccccctggctgttgcgggtggagctggatcnggaagcacatgacttgaccggaagcttaccatgggagcanattgntgaaaagacaatgctggtttggggaccactttgaactc

SEQ ID NO: 1328 - DNA, 382 bp, Homo sapiens
ccagcttctacttcatactgtaaagcatggagaaaagggaattgatgttgatgctgaaaattgtgcagtgtgtattgaaaatttcaaagtaaaggatattattagaattctgccatgcaagcatatttttcatagaatatgcattgacccatggcttttggatcaccgaacatgtccaatgtgtaaacttgatgtcatcaaagccctaggatattggggagagcctggggatgtacaggagatgcctgctccagagtctcctcctggaagggatccagctgcaaatttgagtctagctttaccagatgatgacggaagtgatgagagcagtccaccatcagcctcccctgctgaatctgagccacagtgtgatcccagcttt

SEQ ID NO: 1329 - DNA, 546 bp, Homo sapiens
  misc_feature 512, 546: n = A,T,C or G
ccatctttaagtctggaggcattcctgccctggtgaaaatgctcggttcaccagtggattctgtgttgttttatgccattacaactctccacaaccttttattacatcaagaaggagctaaaatggcagtgcgtttagctggtgggctgcagaaaatggttgccttgctcaacaaaacaaatgttaaattcttggctattacgacagactgccttcaaattttagcttatggcaaccaagaaagcaagctcatcatactggctagtggtggaccccaagctttagtaaatataatgaggacctatacttacgaaaaactactgtggaccacaagcagagtgctgaaggtgctatctgtctgctctagtaataagccggctattgtagaagctggtggaatgcaagctttaggacttcacctgacaggatccaagtcaacgtcttgttcagaactgtctttggactctcaggaatctttcagatgctgcaactaacaggaagggatggaaagncttccttgggactctttggtcaacttctgggttn

SEQ ID NO: 1330 - DNA, 227 bp, Homo sapiens
ccacagtgtcccaccatcaaggagatcagagaccagggctcctatggctcctgctgggccttcggggctgtggaagccatctctgaccggatctgcatccacaccaatgcgcacgtcagcgtggaggtgtcggcggaggacctgctcacgtgctgtggcagcatgtgtggggacggctgtaatggtggctatcctgctgaagcttggaacttctggacaagaaaagg

SEQ ID NO: 1331 - DNA, 328 bp, Homo sapiens
ccaatacggctatgggtgtaggcagctttcagaggaaattagtggtctgggcttgcctccagctccccaggggcagccccagtagctacactgtccagacagcacaagaccaggctggtgtcacgtccatccgagcgctgcctcagggatcgataaagtttcactgcagaaagtctccactgcggtatgctgacatctgccctgaaccttcaccctacagcattacaggctttaatcagattctgctggaaagacacaggctgatccacgtgacctcttctgccttcactgggctggggtgatccttggtgcctttgtttccacaagg

SEQ ID NO: 1332 - DNA, 378 bp, Homo sapiens
  misc_feature 312: n = A,T,C or G
aaagaggaagatggaacagggatgtgagtgtctatggtttcacccctgcctcttcctggtctgcccccttcactatagatggagtgcctgaaactgatcgcctcctccagattcacagacaagagggtgggctacctgggggccatgcttctattggatgagaggcacgatgcccacctgctcattaccaacagcatcaagaagtgagagggttctggcaatcacttggaatcagggagatgggagagtagggaccttggaaatcccaggggactgcctgttgtgggtattgaaaaggactgattttctcanaggtttgactgaccgtcctcccaaaccctgcagtgacctgagccaggggattcagccagtacaagg

SEQ ID NO: 1333 - DNA, 441 bp, Homo sapiens
cctttgccattggtcgcaggaacccatctcttagagctatggggccattcttagtccacgatcattccaactggtgggatgacatccggacatcctcttccagggactggggcaaactcaggccccacacctctggacagctcaaatccagtccccttcctgctccccagtcctggcagtgccgtggatggcggcaggaagtctcacatcatagaggacccctcctcctctcccagttctcaacttctccatgcctggaatccacgggtgaagagagtcggtagatctcataagaaagaatccagtctgacttccctctggagaatgactatggacagaaggccaccatcctccacagagcaccctgtcctgagtaggggttgtgctcattaccccaggccagtggtagcttcctcaggagcctggacctcgccgcgacac

SEQ ID NO: 1334 - DNA, 360 bp, Homo sapiens
aaagttgaactaagattctatcttggacaaccagctatcaccaggctcggtaggtttgtcgcctctacctataaatcttcccactattttgctacatagacgggtgtgctcttttagctgttcttaggtagctcgtctggtttcgggggtcttagctttggctctccttgcaaagttatttctagttaattcattatgcagaaggtataggggttagtccttgctatattatgcttggttataatttttcatctttcccttgcggtactatatctattgcgccaggtttcaatttctatcgcctatactttatttgggtaaatggtttggctaaggttgtctggtagtaaggtggagacc

SEQ ID NO: 1335 - DNA, 541 bp, Homo sapiens
aaatgtcaaagtattgctgcagctaggagaaccgcacatggaaacttgaggaaatttctcttattgctaggactataggacaatgggattcaagatgaatttccacaatgggataaccacgaaccgacctagagaatcaggaagtctcttatcaaagcagatatgtgtcaatgctgctcaaacacacacattcttttctggttggacagattgtaaattattcccaccacctgggggacaggcacacgtttatctagcggtcagtagaagtcacaacccaggcatccaaaccagttagtatgagttattactaagtcaggtgaaaagagctaggtggttatacatttgatctcttaaataacacaggaccaccaaataaataataataaaaaggcacattgtcgttttcatcctggggaccccagtgagagtagggacctcaggtaggctccttggaattggaactgttgtcctgaaaagggcaagcctctgtttaacactctgaatccagggcttgcttgcaccctattctaggtgactc

SEQ ID NO: 1336 - DNA, 313 bp, Homo sapiens
aaataacttgaagctctgtactgtggctcttgttcataagaaacactgaaccaacaagcagcagattcagcccagccaagactctgatgccccagtggaaatcactactcacaagccttaattgatacagttttacactgctttgcctaagaagtacaatacaactcaattaagagtattatcttcaggaaacaattcatatcttcacatagtcattaaaaagtttaacaatttaatgagtaggtttcctatcacattttggcaatatcataaaatggttttagacatgaaagagctattatgatttagaagg

SEQ ID NO: 1337 - DNA, 431 bp, Homo sapiens
aaaaattttttaacttttgtgtcaaataggagttgaggaattgagcaggattctaccctagtccgattgtatagaaaacaccattttgattcaggtattatttttcatatttcaggtttgacttgttcttttcagaaggctaaagtcagaggaatgggggctgggccactcccttggagctctcagatctacagacaagctgtgtgaatgcatagatgtaatcttgtctcaaatactaatatagtggagatttggtttatgttaccattaagttcctctaaaaagtttttcttcctctcttcagagccaaaataaaagtgaactacactgttcagataaggtcacaatctgatgctgtcagtttgaccgagctggttttgcttatggtcatgctgcaatttgttagaataatagggatcaagttttacctc

SEQ ID NO: 1338 - DNA, 535 bp, Homo sapiens
  misc_feature 427, 438, 439, 450, 470, 478, 524: n = A,T,C or G
ccatggtcttgtgctagagatggcggtacaagagtctgttatgcaagcccgtgtgccagggatgtgctgggggcggccacccgctctccaggaaaggcacagctgaggcactgtggctggcttcggcctcaacatcgcccccagccttggagctctgcagacatgataggaaggaaactgtcatctgcaggggctttcagcaaaatgaagggttagatttttatgctgctgctgatggggttactaaagggaggggaagaggccaggtgggccgctgactgggccatggggagaacgtgtgttcgtactccaggctaaccctgaactccccatgtgatgcgcgctttgttgaatgtgtgtctcggtttccccatctgtaatatgagtcgggggaatggtggtgattcctacctcacagggctgttgnggggattaaanngctcgggtgantgaaggacacatcaccttcntgtttcanagtacagcccccaaaaacggggcacgcaggaacctgccgggcgccntccaagggcga

SEQ ID NO: 1339 - DNA, 317 bp, Homo sapiens
  misc_feature 137, 206, 257, 282: n = A,T,C or G
cctgctgtaggtgtggggtgtgggcctggcctgttggaggagactgaggaggtctcttggtggctggagcagagggatgaagggggtaatcagagcaggatagagaggtgttgggtacgtgagcagcagtgaggagnttgggatttgttctgggtaggatgggagtcactggggagacatggctgctgttctgagatagactctangggccagatggatgcagggagcccagcgaggaggctcctggagtcacccangtgggggatgtggggcctggaccanagaatcagagcggcagtatggaggcagggtggagg

SEQ ID NO: 1340 - DNA, 543 bp, Homo sapiens
  misc_feature 422, 505, 509, 529, 540: n = A,T,C or G
cctactgtgacatggaagctggaggaggcgggtggacaattattcagcgacgtgaggatggcagcgttgattttcagaggacttggaaagaatataaagtgggatttggtaacccttcaggagaatattggctgggaaatgagtttgtttcgcaactgactaatcagcaacgctacgtgcttaaaatacaccttaaagactgggaagggaatgaggcttactcattgtatgaacatttctatctctcaagtgaagaactcaattataggattcaccttaaaggacttacagggacagccggcaaaataagcagcatcagccaaccaggaaatgattttagcacaaaggatggggacaacgacaaatgtatttgcaaatgttcacaaatgctaacaggaggctggtggtttgatgcatgtggnccttccaacttgaacggaatgtactatccacagaggcagaacacaaataagttcaaccgcattaaatggtactactggaaagntcangctattcgctcaaggccccnccatgatgatncca

SEQ ID NO: 1341 - DNA, 536 bp, Homo sapiens
  misc_feature 372, 396, 440, 445, 465, 476, 486, 496, 499, 507, 536: n = A,T,C or G
ccatgccctgtcccactgccctgtgccaggctgtcgggccaccagtgccctcttgagacagtctccattggctccaagggttctgtgagccacagaaggttgtgaaaggagaagggcctgaagtgcggcagcaccagggcagcccaaagcagggctgcgttgaaaatatcaaagtatctctttaggggtggctctgagggttggtgggattggagggggaaggggcgcctgggaggagtacagtcagcatctattcttgggcaccgggaggagccgctctctggaatcttaaattaccaggtaggagtgagaatgctgattagctgtagagctgaaggcacggctgccaggcccctccgggtccttctctanttctccaggcccggtgtatcgaangcagtggaaaggaagggcctgtgggagccagggccactcaacancctanccagtcggatttgatgcttncaaacttcacnctcttcaaantttggttctncancttcaggnaataggcacccttgaaaaatactgtgacn

SEQ ID NO: 1342 - DNA, 539 bp, Homo sapiens
  misc_feature 505, 538: n = A,T,C or G
aaaagttattatttttttactctttcttttctttggagagggtaccaaaggatagctgttctgtttaagtagggacctctcatggcctacaggctttgacatctgagaatcaaactggagaacattccgaagcccgttcttataagtgtctccatctctacctgggctgaaatggaatgtgcaaatgtagcccagcctggtccttgggtgttgccagttgattgatgactgggagccaaagtggcatctcctttgacctaaacgggcgatgatgaaataaaactcaacagcctttctctcatcttgcattgtgagatgcgaaatagagcgtgtctctctgcctctcattttaggctgaggccgtccaaagcggccatgccccatgtttccactagatggcgctgacacttcaggcatcaaccctcatggcctctcagccttgcaaaggcagccacttaaagtcggtgtcctgtgtggggcaccaagctgagctgcagacacccantaggcgcgagcaaatgcgtcccattttaagagnt

SEQ ID NO: 1343 - DNA, 224 bp, Homo sapiens
cctcctcagagcggtagctgttcttattgccccggcagcctccatagatgaagttattgcaggagttcctctccacgtcaaagtaccagcgtgggaaggatgcacggcaaggcccagtgactgcgttggcggtgcagtattcttcatagttgaacatatcgctggagtggtcttcagaatcctgccttctgggagcacttgggacagaggaatccgctgcattc

SEQ ID NO: 1344 - DNA, 408 bp, Homo sapiens
aaattccctctagataacagtcatcattggaaacaaccaagaaatgcattttatctgaatttgccacttaaaattctgccatttaccataaatcgctttggaaggcatgggctactttcaagggtgcgatgatgacctacagtcaatgacttagacaagggcgatgccagtggggcttggtatgttctcaagcatcattacccatgccatccccattcagaggttgtggagcagctcgtgcgacctctccttcaaatgggctttagggaaagttaaatgggagtgacccagacaatggtcactcaaaagactcacataaatgagtctcctgctcttcatcaagcaattaagaccagttccccttctagtggaaataagacgtcaaatacaaagttttaagagaagcaa

SEQ ID NO: 1345 - DNA, 177 bp, Homo sapiens; identical to SEQ ID NO: 647

SEQ ID NO: 1346 - DNA, 219 bp, Homo sapiens
aaatcttaaacagccctgaattttgaaatgtagcctagtttgggattctgcaactacaactttacgggatgcctcaaatcaaaactaagagaaacttaacaagcctttacttcagaacctttaagcaagcaatgtcatttttgaaactaacaggtttgtgtgtttttttttactcaacttcttttttttattataaaaggtacacttctgtttatattt

SEQ ID NO: 1347 - DNA, 538 bp, Homo sapiens
  misc_feature 494, 507, 528, 536, 538: n = A,T,C or G
aaagctttgaaaagctactacttttaattctaatacatccagatgaacacgatgtagcaatatcagcttgtattccagagaaatctcattagtttttctggtgatggaaccacttatccacgtctgttggtactgtgcaggcagattcacagggtggtggtaaagcatccacaatggctctggcagcatcaggatcacacttgaaggggctctcagacaaagttgtattcatgctattaaataaaacaaaagtagtcataagacaaaataacaaaaattatctcttaagagttaaaaaatgagttgaaagtggttgaccaggtgatattcaagtttagtttagtcgaaagctttttcacctacatttaacattctaattatgtattttggcaaggcatagctattcttgtgatcaattttattcaaatatcttaacaagttcggatttaagaaactgagattgggctaggtgtggtggctcatgcctgtaattncacactttgggangctgagcaggcggatcatgangtcaaganan

SEQ ID NO: 1348 - DNA, 290 bp, Homo sapiens; identical to SEQ ID NO: 1188

SEQ ID NO: 1349 - DNA, 540 bp, Homo sapiens
  misc_feature 373, 442, 475, 490, 491, 500, 505, 511, 531, 534, 537: n = A,T,C or G
aaaactagaacttggctatattgaatgtgtatttttctttagtgaaatgatgttttatgttattatgtgtgaagtaatatattgtacaagtaataaatgtattgttgagatatattgacactgaggagcttataaaaacaagtcatcttaagttcacaattgctacaagaagaaagttgtggataactaggaaattattgtaagtaatgttttatttcagtacttagcaattagagttcttttattaagatgtatctgctggattaagggtacaggttgaaatagttctgtggctgtcctaagaaataatgggaaaagaatctctggatgtaagtttttctgttgaaactagagggttttttttttctgtttncatatacttttttttaatagcaatgggtttttattaaacatgctgggggccacaggccatgttgttggngaaatatataaacatttatttacctcggccgcnaccaccctaagggcnnaattccacncactnggcggncgttactaggggatcccaanctnggncca

SEQ ID NO: 1350 - DNA, 243 bp, Homo sapiens
  misc_feature 181, 184, 186, 207, 225, 227, 232: n = A,T,C or G
aaaaactacataggggtgtgtgtgtgtgtgtatgtttattttatacacacatatttgtatattctaatatattactaaggcaattttaatgaattaccatgtatataaaaaaatagctgtcacttggcacacaggtttgtatgtatgtgtatatatatgtgtatgtatgtatggtgtgggnacntnccccctaaaaattacccagtnatgtgatttgacatcaantngcccnccccatatctt

SEQ ID NO: 1351 - DNA, 382 bp, Homo sapiens
cctgagcggctagtctttaagatgcgcttctatcgtttgctgcaaatccgagcagaagccctcctggcggcaggcagccatgtgatcattctgggtgacctgaatacagcccaccgccccattgaccactgggatgcagtcaacctggaatgctttgaagaggacccagggcgcaagtggatggacagcttgctcagtaacttggggtgccagtctgcctctcatgtagggcccttcatcgatagctaccgctgcttccaaccaaagcaggagggggccttcacctgctggtcagcagtcactggcgcccgccatctcaactatggctcccggcttgactatgtgctgggggacaggaccctggtcatagacacctttcagg

SEQ ID NO: 1352 - DNA, 535 bp, Homo sapiens
  misc_feature 333, 374, 401, 418, 420, 440, 462, 464, 486, 495, 496, 511,521: n = A,T,C or G
ccaacaggcccgtggtgggcttctgcttaatcttccgtggctgttgcattggcaggctcagcagtttgtcagctgcaatctccatgaagaaggggttgagaatccgaatctgtttaggattgacatcccagatgaggggaggctgtttccagaaaccctttcgcacccgcttcttatcactcaggatggtctcaatccagtggaagtccattgccttgaaagctaccaggacgaggagtgtgtctgggttgttttctactttggggtcgaagtgggcagattcagggtagaagagacgcatggtggtctttggagcccacgtcaccctcatanccagccactggggcattgttcaatcttgatgacccacatcntactttgttgatgggcattcttcccantgagcttgtttcccgcnancccggtgccccgttcccccncgaacccacccaaccgggcggncnaccttggaagggcttctgggantgttctttnngggaatggaaggaancttggtcaanggcctacccccccg

SEQ ID NO: 1353 - DNA, 412 bp, Homo sapiens
  misc_feature 54, 70, 76, 360, 364: n = A,T,C or G
taaagaaataccagtgagtgccttaaagttggagaagtaactgcccatgcccanaaataaggatgccagngcccanaagcagagagattattctgtgtccacaagcagaggccccctcgatgggagggagtggcaggcaggagaaggtggcgctgccaggtgcccgggtctattggaggcgccccatctcagacttcctaacacagcctgtgtggaaggcagaacaaagaatgcatgcccagtcagaaatctgttctattctgctccaggaaaatcggaaacctgtgagtcagagtcagagaaacttacccaagcaacgtaattcctgttttcatgggtcctgtagatgtttgagttcangaangtaaggcggggagtgactgaataaaactcttgccttttacctcggccg

SEQ ID NO: 1354 - DNA, 85 bp, Homo sapiens
aaaaggccaataccatgggaatagtgaagtcaacacagaaaagtaagaagatatgaacagttacaaccaatagaagattttcttt

SEQ ID NO: 1355 - DNA, 427 bp, Homo sapiens
  misc_feature 13, 26, 36, 62, 65, 70, 72, 86, 87, 89, 96, 224, 279, 283,354, 374, 381, 404, 406, 409, 414: n = A,T,C or G
aaccgcgtgatcnagcggacgccagngtgatggatntctgcagaattcgcccttagcgtggncgnggccnangtcagagatggctnntncatttgnccactgagaaattagaaactaggggcaagggggaggaaaagtactgaaatacagtttatgaagcaagtgtgtctcgggctgtgcttgtcccaggagccccagcagcatctgaactgaggcttcttcantcctgcaggaacaggatcatctgtctcagcggtgggcagatgttttcatagacanccanggagtaaacactgttggctctgtgggctgtatgggtctctgccataaatagtcagagatgtggctgtgttntacaacttttagaccagaanatttgantgacctatattgttcttgtgtcnanaancttanattttttttaact

SEQ ID NO: 1356 - DNA, 266 bp, Homo sapiens
ccatggctaggtttatagatagttgggtggttggtgtaaatgagtgaggcaggagtccgaggaggttagttgtggcaataaaaatgattaaggatactagtataagagatcaggttcgtcctttagtgttgtgtatggttattatttgttttgaggttagtttgattagtcattgttgggtggtgattagtcggttgttgatgagatatttggaggtggggatcaatagagggggaaatagaatgatcagtactgcggcgggtagg

SEQ ID NO: 1357 - DNA, 343 bp, Homo sapiens
  misc_feature 220, 240, 261, 277, 292, 329: n = A,T,C or G
cctacgtggagacgctgaagcactgcttcatgatgccccagtccctgggcgtcatcggagggaagcccaacagcgcccactacttcatcggctacgttggtgaggagctcatctacctggacccccacaccacgcagccagccgtggagcccactgatggctgcttcatcccggacgagagcttccactgccagcacccgccgtgccgcatgagcatcgnggagcttgacccgtccatcnctgtggggtttttcttgtaanactgagggatgacttntatgattggcgccancaagtcaaaaacctgtctctgcttggaggtgcccttncccatgtttgagca

SEQ ID NO: 1358 - DNA, 102 bp, Homo sapiens; identical to SEQ ID NO: 1237

SEQ ID NO: 1359 - DNA, 486 bp, Homo sapiens
  misc_feature 407, 432, 443, 448, 470: n = A,T,C or G
ccttgcactgcggccaccacgctccccgctgccaccatggagggcggattggaaatgaacttcacatctgtggcacagagggcaacgaaggtctgcgcgtgtttgcggatgatctgtttgttctcctccgcctctggcattttggagaggaagtgttcaatgaaatcgtgcggggtcattgcggccaggttccacttgagcttgttcaccaggagcagctccatttgcagcagctcctcgggccggatggagttgtcggtgtagatgcacagcttctcggccgtcagggggatggtctccttcatcttagaggccacgaacatgcaagtggcccccacagctgcaggcggctctttttcacgggctccagcgacaggaagcggtccaggtagttcatggacctcggncgcgaccacgctaagggcgaaattncagcacacttngcgcncgtactagtggatccaactcgnaccaacttggcgtaat

SEQ ID NO: 1360 - DNA, 181 bp, Homo sapiens
ccaggtagccttgtttcaccaccgtgccacttaactccacagtgctcaggctaatttcttccttggggcttatcttctttttgtagctctcagcaaaagtgtacagggctgtggagtcatccaggaactgctcggccagatccccagagcgaatggctcccatgcttcggacacccacagg

SEQ ID NO: 1361 - DNA, 269 bp, Homo sapiens
cctaacaaaatggcatataacttaacagtagcagaccagtgttaaaaagtctggagtcaaggggaaaaggtaaaattggaacgtttccagaatctcacaaaaaaacgacaaaccaatgttctaagtgcccaacatgaacaaattaaaaccttaaataaaggtcactgttaacgcctatcctagcataaattcagcaccaagcacaatgttattttactggtttgcctttttcattctgttttttttgttttgttttgttttgttttttt

SEQ ID NO: 1362 - DNA, 124 bp, Homo sapiens; identical to SEQ ID NO: 482

SEQ ID NO: 1363 - DNA, 276 bp, Homo sapiens
ccttcgccgagctgtgcaggaagcgagggatggaggttgtgcagctgaaccttagccggccgatcgaggagcagggccccctggacgtcatcatccacaagctgactgacgtcatccttgaagccgaccagaatgatagccagtccctggagctggtgcacaggttccaggagtacatcgatgcccaccctgagaccatcgtcctggacccgctccctgccatcagaaccctgcttgaccgctccaagtcctatgagctcatccggaagattgagg

SEQ ID NO: 1364 - DNA, 270 bp, Homo sapiens
cctgttttagcctgtgtcttttgtattgtgtgttgctaaagaattctacttttaggaggctaatcaacaatgaaagggttagaaaattgctgtggaacatccaggtgaacttcaggaaagacagtgaaaaatggaaaacgttggagcttctgttgagataatcttcattaggtatatatcttagggatacagccttttctttatcttatagcaggaaaaaaaaacttttgagggaaatagaagggctgcgttacacaaaataaacaatgg

SEQ ID NO: 1365 - DNA, 180 bp, Homo sapiens; identical to SEQ ID NO: 890

SEQ ID NO: 1366 - DNA, 211 bp, Homo sapiens
ccagctccaccctcccgacgaaggccacggggattgacatcgcccacctccgacacccagtgggcgccttggctggtgcggctgctggtccagatggaggaaaccagtgactttatggggctgagctagtagggaagcccctggaaagatgctgcgttccgaacctgtgcctaatacacgcaagggcgctgtcccgcccaaccccgccttt

SEQ ID NO: 1367 - DNA, 179 bp, Homo sapiens
  misc_feature 171, 173: n = A,T,C or G
cctatctggttggcctttttgaagacaccaacctgtgtgctatccatgccaaacgtgtaacaattatgccataagacatccagctagcacgccgcatacgtggagaacgtgcttaagaatccactatgatgggaaacatttcattcccaaaaaaaaaaaaaaaaaaaaatncntttttt

SEQ ID NO: 1368 - DNA, 384 bp, Homo sapiens
ccaggcgctccttgtcggcatcagggagggtggccttgaactgctcatgggctgtggtcagtccctggatctcctcaatggtgtgcacaatgaaggtgtcctgcaggtcctccatggccccctccatccagttgttgaagggtgcagcccgcttggcatactccaagtacagctggtcaatggtctccagcagtttctcggtccgctccagagcttcccttcgcttctgagttagggcccccagattgtcccactggtcacagatcttttggcaacgggcgttgacactgggtgagtcataatagtccagcccattgagctcctgtgcgatggcggcaatctgctccacacggtcctggtgggcagccaggtcactctcgaagg

SEQ ID NO: 1369 - DNA, 241 bp, Homo sapiens
cctcggaattccctttcagctccagctttacccacatcagctgctagacgggtacgggcaaaatcaagagggtacacaaaacacagggatgtggcccctgcggcaccacccgatgccagattccctgcaaagtagcgccaaaactgggttctcttgtccacaccacccaggaagatctgcttgtatttatctttgaaggcgaagttaagagcctgggtggggaagtatctgatgacattgg

SEQ ID NO: 1370 - DNA, 302 bp, Homo sapiens
ccttggcatctctagcccaagctgaggccagatctctccactggagaataggagctgatttcccgctccttccaaccaaagaactgagaagccaggtagatccctgctctcagcctagccatgccggaacccgcgggactttagctaaagcagcttgtgtcactgaagctggacagaacaggcttcttgtaccctaaacaagctacccagactcttcagctccttaaggccgagcccttgtctcactccaggagggcactgggcttcttaatgctttcacccctccgaacacacaccgtttt

SEQ ID NO: 1371 - DNA, 277 bp, Homo sapiens
  misc_feature 241: n = A,T,C or G
cctgctggaaactgcaggaggaatccaggtaccagacacgcggcatagcggcttggttcacctgagaggctggtgtggggcctgggctgccaggaacctcattttcctggggcctcacctgagtgggggcctcatctacctaaggactcgtttgcctgaagcttcacctgcctgaggactcacctgcctgggacggtcacctgttgcagcttcacctgcctggggattcacctacctgggncctcactttcctggggcctcacctgctggagtcttc

SEQ ID NO: 1372 - DNA, 462 bp, Homo sapiens
  misc_feature 316, 317, 379, 382, 408, 423, 429, 435, 437, 444: n = A,T,C or G
ccttttacagatgtcagctttcactggcctccatgcacaacctcccactaccacccaatctgcctgccacaggaaagtgcaggcaccctgggccccctggaggatgcgggcaggggctacagggcatccaggatgtggtcgatcttggtgaccagctcctggcgctttcctgagatgagcttctcattctcaatgtacgtgtctttcttgagcttgccagccaccaggcgctcagcctccaccgccgacttcagcaccagctccttgacctgtgcatccagcttctgcatttcgctcactctgtcgtacagatcannagccctctgtcttcagccttggacttgcagcagtgcaatctcactggtcaaggacctcggcncgngaccacgctaaagggcgaaattccancacaacttggcgggncggttnctaagngngatccanagctcgggtaccaagcct

SEQ ID NO: 1373 - DNA, 241 bp, Homo sapiens
cctcctatttattctagccacctctagcctagccgtttactcaatcctctgatcagggtgagcatcaaactcaaactacgccctgatcggcgcactgcgagcagtagcccaaacaatctcatatgaagtcaccctagccatcattctactaccaacattactaataagtggctcctttaacctctccacccttatcacaacacaagaacacctctgattactcctgccatcatgacccttg

SEQ ID NO: 1374 - DNA, 133 bp, Homo sapiens
gtcactgtagcgggacttcttttggttttctttctctttggggcacctctggactcactccccagcatgaaggcgctgagcccggtgcgcggctgctacgaggcggtgtgctgcctgtcggaacgcagtctgg

SEQ ID NO: 1375 - DNA, 495 bp, Homo sapiens
  misc_feature 357, 399, 418, 443, 474, 476, 477, 488: n = A,T,C or G
aaaactagaacttggctatattgaatgtgtatttttctttagtgaaatgatgttttatgttattatgtgtgaagtaatatattgtacaagtaataaatgtattgttgagatatattgacactgaggagcttataaaaacaagtcatcttaagttcacaattgctacaagaagaaagttgtggataactaggaaattattgtaagtaatgttttatttcagtacttagcaattagagttcttttattaagatgtatctgctggattaagggtacaggttgaaatagttctgtggctgcctaagaaataatgggaaaagaatctctggatgtaagtttttctgttgaaactagagggtntttttttctgtttacatatactttttttaatagcaatggggnttttattaaaacatgctgngggccccaaggccatggttgttggnggaaatatataaacattttttttccctcggncnnaccaccctaanggcgaat

SEQ ID NO: 1376 - DNA, 110 bp, Homo sapiens
ccaggaggcagggctgggcaggatgactggggctacatggggcttggcccttccctgtggctggcagccccgatgctgcagtaacactcatttcccaggcttcactatgg

SEQ ID NO: 1377 - DNA, 171 bp, Homo sapiens
cctcggtgcctgcagtggagatctgctgcgacagatcagcggccgggatcactttctcagccaaggacacacggtagttctccaggaagatcactttcaacctgtcacccacaactgggtcatgattgacgacgtcgccgatggaggtgaccaacttgatgatcagcttgg

SEQ ID NO: 1378 - DNA, 494 bp, Homo sapiens
  misc_feature 448, 468: n = A,T,C or G
ccacctagtactttgctgacagggacatgttctgtgctggccgagtacctgaggaggatctgaagaggacaatgatggcctgtggaggctcaatccagaccagtgtgaatgctctgtcagcagatgtgctgggtcgatgccaggtgtttgaagagacccagattggaggcgagaggtacaatttttttactggctgccccaaggccaagacatgcaccttcattctccgtggcggcgccgagcagtttatggaggagacagagcggtccctgcatgatgccatcacgatcgtcaggagggccatcaagaatgattcagtggtggctggtggcggggccgttgagatggaactctccaagtacctgcgggattactcaaggactattccaggaaaacagcaactgttgattggggcatatgccaaggacctgcccgggcggccgcttanggcgaattccacacacttgngcccggtcttagtggatccaactcgg

SEQ ID NO: 1379 - DNA, 406 bp, Homo sapiens
  misc_feature 360, 370: n = A,T,C or G
cctaagttattgtttgcataaaaagaatcatgttccctgtgtacatttaagaaaaaaacaaaaaaacggaaatgtcagaattgtatggaaataaaacttgtttgaaaatttggaatagtgctgctgtcagcttatttttctggtacttgtattttcacatgttaaatgatctttatatatgttgaattaacaaatattttgagtttctgagaaaaaacaaaacatattaatggtattgaaatgtgttagtagtctggctgtgtgcccaaaattctgtttcgcagcaaaagtgaagacctgtatgtaaagaaagtataacaattatttctttgtattttaggggctttaaccggaacatcngtctactggngttaggaatgtttgcttaatttccagactttttttt

SEQ ID NO: 1380 - DNA, 509 bp, Homo sapiens
  misc_feature 205, 351, 387, 426, 433, 454, 470, 471, 474, 485, 488, 493,499, 508, 509: n = A,T,C or G
aaacagttggaacaccggtggcactgttaactgctttctgggcagcctctttagcttggtgggcttgtagtacagctacagcttcatcaaccttagaacggagtgactctggagactcgagcatatgaagaagttctgaattatcaatctccaacaacatgccagtgattttaccagcaagagtagggtgcatggcttgaataanaggaaacagccgttcacccaacatttgcttttgctcttgaggaggggcagatgccaacattggaaagcagtcaaagggttctgaccttgtacatgaacaagcaggctgttgcattgtaacttgtggctgtgcattaagatgttgcntgaggattgccaactcctgcaccatatttatactgntggaacggtgcggacagcaggagtaacttgcaccggctncaagctncaggacgtgggacccatttgnctgtgtttgatgtggnnaanaacacccttgngtngactnacttcntgggaaccnn

SEQ ID NO: 1381 - DNA, 256 bp, Homo sapiens
  misc_feature 148, 227, 242, 246: n = A,T,C or G
cctgtctgaggataccactgaagagacattaaaggagtcatttgacggctccgttcgggcaaggatagttactgaccgggaaactgggtcctccaaagggtttggttttgtagacttcaacagtgaggaggatgccaaagctgccaangaggccatggaagacggtgaaattgatggaaataaagttaccttggactgggccaaacctaagggtgaaggtggcttcnggggtcgtggtggangcanaggcggcttt

SEQ ID NO: 1382 - DNA, 441 bp, Homo sapiens
  misc_feature 191, 301, 305, 313, 329, 338, 363, 371, 376, 382, 393, 404,414, 419, 437: n = A,T,C or G
gggatatgtaaatagtacgtgattgagcaagtgcagcaccagtgcacagtctcatcatcgtctctgtgggtacctgagtggaggtgaatcgactggcctgaatgaaaagagtgaaagttcccatgtggttcctcaaggacagggaactggggactggcctcaaagtaggcattagaataaactgcccacancagtttaatgtggagaggtgtaaaatatttgaaccttccttataaacacatgctagccaagcttgcagctctgttatggaagctgatgctctgtgggtaacagactcacncttnatccttgntaaccaaggaaagctnttacttgcnttggccttcaaagaaacttgggcanccataatnattcnaaaccnctgccccgggntatcttgttcncagccctgantaagntggatttcccatggaacnttgc

SEQ ID NO: 1383 - DNA, 296 bp, Homo sapiens
  misc_feature 23, 24, 30, 202, 220, 239, 249, 254, 264, 265, 277, 291: n = A,T,C or G
ccaccagggtctgcatctcaggnnacctcnaaccccaccgtttggggtgagaagcagaatctgtgcttccccagtctccttgccccagacaaccagcatgtaagacccttcccgcttcaccattccgattcctgtcccctttggggtacttgggggagactctggctcccaggatctgttccctatttcagtgccttcctangacacaggggactccttnacgctccccaggctttctntgcccatganctgcncgggcggccnntaatggcgaatnccagcacactggtngctcg

SEQ ID NO: 1384 - DNA, 406 bp, Homo sapiens
  misc_feature 384: n = A,T,C or G
ccaagattggtaataaggaagcttgcaaagttttagccaaacaacttgtgcatctacggaaacagaagacgagaacttttgctgtaagttcaaaagttacttctatgtctacacaaacaaaagtgacgaattcccaaatgaagatggctggagcaatgtctaccacagcaaaaacaatgcaggcagttaacaagaagatagatccacaaaagacattacaaacaatgcagaatttccagaaggaaaacatgaaaatggaaatgactgaagaaatgatcaatgatacacttgatgacatctttgacggttctgatgacgaagaagaaagccaggatattgtgaatcaagttcttgatgaaattggaatttgaaatttctggaaanatggacctcggcgcgcgaccac

SEQ ID NO: 1385 - DNA, 504 bp, Homo sapiens
  misc_feature 497, 499, 503: n = A,T,C or G
ccaactatgcctctcagaacatcacctaccactgcaagaacagcattgcatacatggatgaggagactggcaacctgaaaaaggctgtcattctacagggctctaatgatgttgaacttgttgctgagggcaacagcaggttcacttacactgttcttgtagatggctgctctaaaaagacaaatgaatggggaaagacaatcattgaatacaaaacaaataagccatcacgcctgcccttccttgatattgcacctttggacatcggtggtgctgaccaggaattctttgtggacattggcccagtctgtttcaaataaatgaactcaatctaaattaaaaaagaaagaaatttgaaaaaactttctctttgccatttcttcttcttcttttttaactgaaagctgaatccttccatttctttctgcacatctacttgcttaaattgtgggcaaaagagaaaaaaaaggattgatcagagcattgtgccaatacangnttcnt

SEQ ID NO: 1386 - DNA, 488 bp, Homo sapiens
  misc_feature 235, 368, 384, 415, 420, 431, 479, 483: n = A,T,C or G
cgccgcttgtgctgcagccatgtctctagtgatccctgaaaagttccagcatattttgcgagtactcaacaccaacatcgatgggcggcggaaaatagcctttgccatcactgccattaagggtgtgggccgaagatatgctcatgtggtgttgaggaaagcagacattgacctcaccaagagggcgggagaactcactgaggatgaggtggaacgtgtgatcaccattatgcanaatccacgccagtacaagatcccagactggttcttgaacagacagaaggatgtaaaggatggaaaatacagccaggtcctagccaatggtctggacaacaagctccgtgaagacctgggagcgactgaagaanattcgggcccataganggctgcgtcacttctggggccttcgtgtccnaagcnagcacaccaanaccactggcccgccgtgggccgcaccgtgggtgtgtccaaaaaaaaanaaanattgt

SEQ ID NO: 1387 - DNA, 502 bp, Homo sapiens
  misc_feature 417, 421, 439, 476: n = A,T,C or G
ccttgtgctcagaaatgagagctgcagtgaaaactacaccaccgacttcatttaccagctgtattcagaagagggcaaaggcgtgtttgactgcaggaagaacgtgctgggtcacatgcagcagggtggggcaccctctccatttgatagaaactttggaaccaaaatctctgccagagctatggagtggatcactgcaaaactcaaggaggcccggggcagaggaaaaaaatttaccaccgatgattccatttgtgtgctgggaataagcaaaagaaacgttatttttcaacctgtggcagagctgaagaagcaaacggattttgagacggtttccatgcagccgccgcggtgaactcccctctggtggacactcccccagggcctcggtgtgatggagtttcctgaatcacgcangganacgtggggacacccttgngcacctttccttttacttctgtttttacctcggccgngcccccctaagggcgaatttcagcct

SEQ ID NO: 1388 - DNA, 508 bp, Homo sapiens
  misc_feature 294, 355, 382, 432, 440, 458, 493, 498, 501: n = A,T,C or G
ccaattcttcaaagaaaattacaaatgatcaacaaacacatgaaaagatgctcaatatcagcactcattaggaaaatgcaagtccaaaccacaatgagatgccacctgaaaccaatcaggatggctgttatcacacacctacacacacacatacacacacacagagcaaggttggcaaagagacagagaaaatgaagccccctgtgtctgctttctatttctggatatatcccaaaagaaatacccaaaggaaataaatatatacccaaaggaaatgaaatatttgccaatatncaaaaggtagaagtaacccaagtgtccattgtctgaggggatggataacccaagatgtggnacatacatattaatgaagtattatccnccttaaaaggaatggaatttttgacccctacttccacttgggatgaaccnccaaaaanattattattattattggntttattttttttttttttggaaaaggaatttcccnttttnttnccccagg

SEQ ID NO: 1389 - DNA, 539 bp, Homo sapiens
  misc_feature 129, 334, 342, 345, 348, 359, 364, 367, 372, 405, 406, 429,431, 443, 451, 454, 461, 462, 468, 472, 473, 482, 487, 489,515, 518, 521: n = A,T,C or G
ccagttagattatgggtccaaagggattccagacacttctgagccagtcagctaccacaactctggagtaaaatatgctgcatccgggcaagaatctttaagactgaaccacaaagaggtaaggctctncaaagagatggaccgacccttgggttaggcagcccttctgccccagagaaacactccagagactgctacaaggaggaagaacacctcactcagtcaatcgtcccaccccctaaaccagagaggagtcatagcctcaaactccatcatacccagaacgtggagagggaccccagtgtgctgtccagtaccaaccacacggcaagcncccagaanagnggngactgttgtgntccanttntgatnacctgggaagaattaccacttcccttgcttaannacccaagcgaaggagtctttttngnaagggggcgggnattggggnccntattttnncccccntggnntttttcccnatccncngaagcaagggaccttatgtcttccancgnttngggttaaggggggccttt

SEQ ID NO: 1390 - DNA, 326 bp, Homo sapiens; identical to SEQ ID NO: 887

SEQ ID NO: 1391 - DNA, 234 bp, Homo sapiens; identical to SEQ ID NO: 1129

SEQ ID NO: 1392 - DNA, 403 bp, Homo sapiens
  misc_feature 8, 267, 278, 366, 382, 390: n = A,T,C or G
ccatcatnctcgaagcagtcaacctcccggtcgaccatatctccttgatcctggctgtggactggctagtcgaccggtcctgtaccgtcctcaatgtagaaggtgacgctctgggggcaggactcctccaaaattacgtggaccgtacggagtcgagaagcacagagcctgagttgatacaagtgaagagtgagctgcccctggatccgctgccagtccccactgaggaaggaaaccccctcctcaaacactatcgggggcccgcangggatgccacngtcgcctctgagaaggaatcagtcatgtaaaccccgggagggaccttccctgccctgctgggggtgctctttggacactggatttatnaggaatggataaatgnatgagctnaggctcttggggg

SEQ ID NO: 1393 - DNA, 504 bp, Homo sapiens
  misc_feature 458, 489: n = A,T,C or G
aaagagatgggggtcttactatgttggctaagctggtctcaaactccttgcctcaggtaatccttctgcctcagcctcccaaagtgctgagattacaggcatgagtcaccatgcccgacttccctttgtgtaaaatgagataatatgtatgtcacagaattgttttaaggatgataaaggactaagtgagataatgtaggtgaagtttagtatgatgcctggctcatagttaagtgctgaattatgatagtaatcaatatctactcctaacctctttcttcacagattttaagcttctgtctttctagggggttaagagtcataaaccaaaattacactttcctctgctaggtttcctccctttcctcttcttgacagtctgatgggaaacaaaggcacacataagagcctattccaagtagtcaacacctgaaaggaagggatatggagaagtaatncttcatatctccaggaatgcctgtgaagaanctgaggaatgggact

SEQ ID NO: 1394 - DNA, 267 bp, Homo sapiens; identical to SEQ ID NO: 1102

SEQ ID NO: 1395 - DNA, 378 bp, Homo sapiens
ccactttctttcccacctgggaaggcggcatctatgacttcattggggagttcatgaaggccagcgtggatgtggcagacctgataggtctaaaccttgtcatgtcccggaatgccggcaagggagagtacaagatcatggttgctgccctgggctgggccactgctgagcttattatgtcccgctgcattcccctatgggtcggagcccggggcattgagtttgactggaagtacatccagatgagcatagactccaacatcagtctggtccattacatcgtcgcgtctgctcaggtctggatgataacacgctatgatctgtaccacaccttccggccagctgtcctcctgctgatgttcctcagtgtctacaagg

SEQ ID NO: 1396 - DNA, 259 bp, Homo sapiens
ccactacaggtgaggaaatgaatttctaagttaattcaaattcaaatgccacatttggctcgtggctcctgtactggacaacacagctgtaggccctgacctggtccagggcactttggttcaaaagccaactctgaggagagcaagtggcagaaacagcccttgggctcccctccccagagagaaacggcagctgcagctgctggaaagggcaagaatcagagtggggggacacctcgggcgcgccggataaggttgg

SEQ ID NO: 1397 - DNA, 508 bp, Homo sapiens
  misc_feature 382: n = A,T,C or G
aaatggtcagcagtccaaatgcattgaaaaatagcatttggtttacacagaactgttggaacagatctactgtgtaaagcaaaatgaaccaattcttgaaaagtgttccagggccacaggttcttagattgggaagcaagatgacagttctgactagcttagttttccagattgaaagtaatggaattaaaataatgataactgtagaccttctcccttaaggatggtgccctggggctttggggaaaccaggatggaggcagaatcactgcctcacttcttcagcttagggcctacagaaactcactggcattgccagtaacctgttggaagctggcacagccaatctacagcagagagccctgggatgaggatgccccangaggaaaagaaattggcaccacggaaattatggcctgaagagggagaagagccaggggaggaatgaaaccatagatgggcaactcctgggctccagtttccctggattctctaaagggcctctctc

SEQ ID NO: 1398 - DNA, 409 bp, Homo sapiens
  misc_feature 144, 316, 339, 354, 357, 371, 372, 384, 386, 388, 396: n = A,T,C or G
ccacccttctgcccaggggctgaccctcgggccccatccccagcagcccaaaggctgtgttgaagaggttgatgggagtggagccatcggtgatgagggttgatttcaggcccagggactggagcagttttacctgcatctcangcccagccacagcaaggtccctgatggtgctggggcctatggcctctgtcatctgcttgaacttcttcacctccacctcagccagctgctgagccttgctcacctccagctccagctgggcccgggcatagaccagttccagctctcggaccttctggaccctctggagctnagcctccgttttaaatggacctngggccgcgaccaccnctnaagggcgaattccnncacactggcggncngntactaagnggatcccgagctc

SEQ ID NO: 1399 - DNA, 199 bp, Homo sapiens; identical to SEQ ID NO: 1033

SEQ ID NO: 1400 - DNA, 439 bp, Homo sapiens
cctccggccagctgcctgccctcttgtctgtgcttcagccctgcacaaaagcagcttggtgacaccactcagccacccagagtacgtgtttacaggctttccagatcaccttcctgtggggtgaacgtaatgaggcggggctggtccttggaatttcccctggaaaatggtaacagactccatccttgacccggggatgagcatgaaggcattgtcccaaaggcagaggccaccgtggtaggaattccaccaaggccagaagggaaaaaggaagaacccaccgtgtctggctgtgcgggccctggggagggtcgtgagtgcagcccctctctacttctgtgcctttgtaaaacgtgtagataaccgcagtggttggctgagccaagaactctcctaaatcagtggctttctccccaccccttgctggggagtcattttt

SEQ ID NO: 1401 - DNA, 570 bp, Homo sapiens
  misc_feature 394, 428, 435, 456, 464, 474, 477, 496, 504, 528, 529, 538,552, 555, 563: n = A,T,C or G
cctcccccagcatgaagaaatctgcctgggcctgtttactctcatcctcactgaacctgcccaagcccagaagtgttaccgggacttagctctggtgagtcgtgatggcatgaatattgtcctgaataaaatcaaccagatacttatggagaagtacctgaagctgcaggatacctgccgtactcagttggtgtggttggtacgggaactggtgaagagtggggttctgggagccgatggtgtttgtatgacgtttatgaagcagattgcaggtggagatgttacagccaaaaatatctggttggcagaaagtgttctggatatcctgacagagcaaagggagtgggtcctgaagagcagcatcctcattgccatggctgtttacacgtacctncgcctcatcgtggaccaccatgggactgcccagnttcaggncctgcgacaagaaggaagtanacttctgnatctcactgnttngggaacggttcatggaatntcttgatnaatgggtcgggatctcgtaaaaanntactttcanaaatgtttggttanggnatacccanaaatttt

SEQ ID NO: 1402 - DNA, 294 bp, Homo sapiens
aaagtgttcaggtaccaaacacagttctgtgtgaggttttatgcctacttcctcaacaccaattcagaggcaacacctgtgcatctgtcccaccaaaggtgctttaatacctaccttcactatttgagaaaggacactcacagttgcctgtgggttatgaaagaattggccctacgtcctgcatgtaagatgttacaggggacattgggccaggcattattatatagagaagtcttatttgccaagctctgactaacttctggatatgaaaataaggaacttgcccagcatagg

SEQ ID NO: 1403 - DNA, 635 bp, Homo sapiens
  misc_feature 431, 524, 531, 539, 564, 569, 589, 604, 627: n = A,T,C or G
ccttggtcctagcacccactcgagaattggctcagcagatacagaaggtggtcatggcactaggagactacatgggcgcctcctgtcacgcctgtatcgggggcaccaacgtgcgtgctgaggtgcagaaactgcagatggaagctccccacatcatcgtgggtacccctggccgtgtgtttgatatgcttaaccggagatacctgtcccccaaatacatcaagatgtttgtactggatgaagctgacgaaatgttaagccgtggattcaaggaccagatctatgacatattccaaaagctcaacagcaacacccaggtagttttgctgtcagccacaatgccttctgatgtgcttgaggtgaccaagaagttcatgagggaccccattcggattcttgtcaagaaggaagagttgaccctggagggtatncgccagttctacatcaacgtggaacgagaggagtggaagctggacacactatgtgacttgtatgaaaaccctgaccatccccaggcagtcatntttattnaacacccnggaggaaaggtgggacttggcttanccganaaaatgcttgcttcaaaatntccttgtttcccccntgccttggagaatttggaccaanaaggaaac

SEQ ID NO: 1404 - DNA, 566 bp, Homo sapiens
  misc_feature 508, 532, 538, 541, 546: n = A,T,C or G
aaatgtagctgaccaaaagcttcttgaagctagtacacagtttcagaaaaaacaaggaaagaatactattgatgtctggtggctttttgatgatggaggtttgaccttattgataccttaccttctgacgaccaagaaaaaatggaaagactgtaagatcagagtattcattggtggaaagataaacagaatagaccatgaccggagagcgatggctactttgcttagcaagttccggatagacttttctgatatcatggttctaggagatatcaataccaaaccaaagaaagaaaatattatagcttttgaggaaatcattgagccatacaggacttcatgaagatgataaagagcaagatattgcagataaaatgaaagaagatgaaccatggcgaataacagataatgagcttgaactttataagaccaagacatacccggcagatcaggttaaatgagttattaaaggaacattcaagcacagcctaatattattgtcattgangtctcccaattgcaccaaaaaggngctggngtnagtgntctcttacatggcatgggtt

SEQ ID NO: 1405 - DNA, 103 bp, Homo sapiens
cctcattccaggtcagctgggcaattctctcaggcttgccatcttgtgtcctgttttcttctacttcctcagtgatgtggaccagggggtgggtgacctgggc

SEQ ID NO: 1406 - DNA, 384 bp, Homo sapiens
ccttcgagagtgacctggctgcccaccaggaccgtgtggagcagattgccgccatcgcacaggagctcaatgagctggactattatgactcacccagtgtcaacgcccgttgccaaaagatctgtgaccagtgggacaatctgggggccctaactcagaagcgaagggaagctctggagcggaccgagaaactgctggagaccattgaccagctgtacttggagtatgccaagcgggctgcacccttcaacaactggatggagggggccatggaggacctgcaggacaccttcattgtgcacaccattgaggagatccagggactgaccacagcccatgagcagttcaaggccaccctccctgatgccgacaaggagcgcctgg

SEQ ID NO: 1407 - DNA, 226 bp, Homo sapiens
aaaaatgccagcaattttaatctagcagtgttgaagctgggaattttttggcgcaatccatgtagcagtgacccaggcttgggagccagaaacaagtgtgacctgggattttatttaacacaactgttgccaaagagttggctttgtttatttggttttggcggggagaggagtggtatttgatgctttctgtggacaatgtaaccctaaacacatcatgtatttt

SEQ ID NO: 1408 - DNA, 413 bp, Homo sapiens
  misc_feature 394, 402: n = A,T,C or G
ccaggggcgtccacgtggcagacggcaaagtgctgggtgatctcctgcatgtcctcgtagttgaagagggggttgtagcaggttttgtggttcatgccgatgtcatggtaggtgaggatgacaggccggtttcccttgggagtcccacacagcgtgacgtgaacagagccatgtaaagtctcgatgtcctgctcctggacatcaaactcttgcaggaggccggtgatggtctcccctttctccaccaaaggcttcacctcagcgaggtctacatcctgcatctcccgagacatgtccctgctgtcacctgcctaacgcgagggagaaagaaaaggacggtgccgaggctggcggcccacgccccgcggaaccgagggcggatggtgaactgacnagcttcancaccagctggg

SEQ ID NO: 1409 - DNA, 441 bp, Homo sapiens
aaaagaattaaataaaaacctgagaagtctaacgtgaagctaggactcctgcctgcttcccttcaggcacctgctgtgcctccttctccgcagatgctctggttggaagcctcctgcactgccttctgtgacagcaccagctggacgttgtcatgaaatgtcacgagttctgggtgtttcctggtctgcagtccgcagctccctgccatcggccacccgatctcacgatggcacagcagacaaactctgaggagcctcccaggagcctagggcttttcctccgccctcttctgtaagcagactggacagcaggcccctgggatgttcacggggacagcacaggtggcagggggggcaaagcttccaccaacaggtgacctgcccgtctttgcattcacaaatggtgcatgcatcttttttccactttggtgttgttggcgt

SEQ ID NO: 1410 - DNA, 453 bp, Homo sapiens
  misc_feature 164, 225, 247, 305, 310, 330, 365, 372, 381, 384, 399, 428: n = A,T,C or G
ccagttccgggtatacccggagctgcccaagccctccatctccagcaacaactccaaacccgtggaggacaaggatgctgtggccttcacctgtgaacctgagactcaggacgcaacctacctgtggtgggtaaacaatcagagcctcccggtcagtcccaggntgcagctgtccaatggcaacaggaccctcactctattcaatgtcacaagaaatgacacagnaagctacaaatgtgaaacccanaacccattgagtgccaagcgcagtgattcagtcatcttgaatgttctctatggccccngatgnccccaccatttcccctctanacacatcttacagatcaggggaaaatctgaacctntcctggncacggcagnctntaacccacctgcacnagtacttcttgggtttgttgatggggaanttttccagctatcccaccccaaata

SEQ ID NO: 1411 - DNA, 565 bp, Homo sapiens
  misc_feature 338, 392, 454, 458, 510, 523, 530, 537, 546, 547, 559: n = A,T,C or G
ccttgaatgagcgtggagagcgattaggccgagcagaggagaagacagaagacctgaagaacagcgcccagcagtttgcagaaactgcgcacaagcttgccatgaagcacaaatgttgagaaactgcctatcctggtgactcttcttaagagaaactgaagagtttgttcagcagtttttacaagaattcgggacctccgcttgcttctttttttccaatatttggacacttagagtggtttttgttttttcttttcagatgttaatgtgaaagaaagggtgttgcatttttacatttccctaatgatcttgctaataaatgctacaatagcatcggnttcattttggggtttttgcctcctcccactgtgtgtatgtgggtatatgtatgntttgaatatgttttctttattaaaaaatattttttgtagtttgaatatgaaaatttggaccnaaangataaactgcgcctggagtcttaaactggccaccatggattttttttctctngattttaaagcangaaaggntttttantgggggggnnatcaaaaggttntttttc

SEQ ID NO: 1412 - DNA, 297 bp, Homo sapiens
ccaggtctccaccaggcaccacagtgggaggctggtagttgatgccaaccttgaagccagtggggcaccaatccacaaactggatgctgcgcttggttttgatggtggcaatggcagcattgacatctttgggaaccacgtcaccacggtataacaggcagcaagccatgtatttaccatggcgagggtcacatttcaccatctggttggctggctcaaagcaagcattggtgatctctgctacagtaagctgttcatggtaggctttctcagcagagatgacaggggcatatgtgg

SEQ ID NO: 1413 - DNA, 294 bp, Homo sapiens
ccagaaccagcctctgcggggcttgtgctctgcaaagactctgctgctggggattcagctctagaggtcacagtatcctcgtttgaaagataattaagatcccccgtggagaaagcagtgacacattcacacagctgttccctcgcatgttatttcatgaacatgacctgttttcgtgcactagacacacagagtggaacagccgtatgcttaaagtacatgggccagtgggactggaagtgacctgtacaagtgatgcagaaaggagggtttcaaagaaaaaggattttgttt

SEQ ID NO: 1414 - DNA, 592 bp, Homo sapiens
  misc_feature 416, 524, 533, 547, 548, 549, 571, 573: n = A,T,C or G
cgccgcttgtgctgcagccatgtctctagtgatccctgaaaagttccagcatattttgcgagtactcaacaccaacatcgatgggcggcggaaaatagcctttgccatcactgccattaagggtgtgggccgaagatatgctcatgtggtgttgaggaaagcagacattgacctcactaagagggcgggagaactcactgaggatgaggtggaacgtgtgatcaccattatgcagaatccacgccagtacaagatcccagactggttcttgaacagacagaaggatgtaaaggatggaaaatacagccaggtcctagccaatggtctggacaacaagctccgtgaagacctggagcgactgaagaagattcgggcccatagagggctgcgtcacttctggggccttcgtgtccgangccagcacaccaagaccactggccgccgtggccgcacccgtgggtgtgtccaagaaaaaataagtctgtaggacctgcccgggcgcccgctcgaaaggcgaattccancacaccttngcggcgttacttannnggatcccaactcggtacccaancnttgggcgtaaatcattggg

SEQ ID NO: 1415 - DNA, 218 bp, Homo sapiens
aaagaataaagtctttgggaggtctcacggtgtagagaggagctttgaggccacccgcacaaaattcacccagagggaaatctcgtcggaaggacactcacggcagttctggatcacctgtgtatgtcaacagaagggataccatctccttgaagaggaaactctgtcactcctcatgcctgtctagctcatacacccatttctctttgcttcacagg

SEQ ID NO: 1416 - DNA, 434 bp, Homo sapiens
  misc_feature 289, 387, 420: n = A,T,C or G
cctccttcggccttcttcctcttctgctctgagtatcgcccaaaaatcaaaggagaacatcctggcctgtccattggtgatgttgcgaagaaactgggagagatgtggaataacactgctgcagatgacaagcagccttatgaaaagaaggctgcgaagctgaaggaaaaatacgaaaaggatattgctgcatatcgagctaaaggaaagcctgatgcagcaaaaaagggagttgtcaaggctgaaaaaagcaagaaaaagaaggaagaggaggaagatgaggaagacnaagaggatgaggaggaggaggaagatgaagaagatgaagatgaagaagaagatgatgatgatgaataagttggttctagcgcagtttttttttcttgnctataaagcatttaacccccctgtacacaactnacttcttttaccta

SEQ ID NO: 1417 - DNA, 381 bp, Homo sapiens; identical to SEQ ID NO: 1279

SEQ ID NO: 1418 - DNA, 425 bp, Homo sapiens
aaaccaaattgagattaaattgaagaaaagcaagcaaattaatttcagcttgattatcaacctgtatcaagaacaaaaatgggaggaggtgtccacatttatggtgtgtataggtaacatggggaaaatgctattctgtgttttggaaaagaagaaatagtgccgtcctatttatttctatatttagaaatttttctcaaagaaatttcaattgtatctatgagatgggtttctaagtatcttattgtgtgttataagtgccttttaatatcataccaagtgtgagcttctggacattttcaagagcttacaaaaactaagtggcattgtatttttataaccccattgagaagactaagtaagaaatgaaatgtcctatcaattttattttgtcatgcttcaaacaataaagacatttctgcttt

SEQ ID NO: 1419 - DNA, 122 bp, Homo sapiens
cggccgaggtaaaccaagaatgatttctcctgcttccttctcctcaccatcttcccagacggagttcaaaggccacttctcaagcagcttttggcaccttcagcctcagagtggaatctttt

SEQ ID NO: 1420 - DNA, 686 bp, Homo sapiens
  misc_feature 472, 505, 537, 581, 618, 622, 638, 643, 647, 662, 665, 670: n = A,T,C or G
ccaagcagggacacaataggaaaaactggaaggtgcgtcgctttgttctaaggaaggatccagctttcctgcattactatgacccttccaaagaagagaacaggccagtgggtgggttttctcttcgtggttcactcgtgtctgctctggaagataatggcgttcccactggggttaaagggaatgtccagggaaacctcttcaaagtgattactaaggatgacacacactattacattcaggccagcagcaaggctgagcgagccgagtggattgaagctatcaaaaagctaacatgacaaggacctgagggaaccaggattcctccctcctaccagatgacacagacaagagttcctggagaatgggagtgttaagacttttgacttctttgtaagttttgtactgctttggagagtgaatgctgccaagagttcctcagattacaaacagcagtggtgccatttccttncccatcttcatgttacaaacctggaaaggctanaacagccattaggcgtcacatcttgacttttncccacattcacaaacaagcatttcctcgggcaccaaagtaggtncctttgttggacaattcacttggacctgccggcggcngtcnaaagggcgaatttccnccaanttgngccgttcttatggantcnactcngtccaacttggcgtaa

SEQ ID NO: 1421 - DNA, 569 bp, Homo sapiens
  misc_feature 442, 473, 515, 518, 536, 539, 548, 559: n = A,T,C or G
cctcttcaagggcccgagccagggacagggccttggtttccttctccctggcttctgcctcagctctgtccctctcatccgcgtatttggaagagatgtttttctcctcggctaacaactgatcaaatttcctctgcttcttttccaggttggacacgagttgccgctggttgtccaaatcaacaaccaggtcgtccagctcctgctgaagcctgttcttggtcttttccagtttatcataagcggccgccttctcctcgtactgctgggtgaggttctcgatctccttctggaacctcttcttcccctcttccagagcttccacggtgctggcaaagtcctgcagcttcttcttcgagtcggagagctggatgttgagagtggagatgtggcgctccaggttctgcttggcctccatctcctcgtccagctggtcttgcangctgttccgctcctcctccagcttggcgcancttcgtaaacacgttgagcttctgccgggtttcttcttgaancancttctgggggtcctgganctnggaactganggacccacgtncttggacttc

SEQ ID NO: 1422 - DNA, 413 bp, Homo sapiens
aaataaatacttagaacacgacttggctcctacaagcatctggactctaggtctcagtactggagtgtctcacccatgggccccacgcagggacgccacggttccctcccaccccgtgatcaagacacggaatcggctgccgatggttggatcgcaatgcgccccttttctagagccttccccggccatctacaggcaggatgcggctgggaaaaagacaactggaatttctcgaaggttgatggtccgcacggttgaggattctacgtggttctcttggttcccctggtgtgtgtgtgtgtgtggaggaggccgcggcccttagatcaccttcttgagctcgtcgtacaggaccagcacgaaggcgccccccatgccccgcaggacgttggaccacgcacccttgaagaagg

SEQ ID NO: 1423 - DNA, 643 bp, Homo sapiens
  misc_feature 527, 533, 592, 616, 618: n = A,T,C or G
ccaacatcatatacctcttgaagaagaaggagtcagccatcgccaacttgtctctgtagaagctccgggtgtagattcccttgcactgtatcatttcatgctttgatttacactcgaactcgggagggaacatcctgctgcatgacctatcagtatggtgctaatgtgtctgtggaccctcgctctctgtctccaggcagttctctcgaatactttgaatgttgtgtaacagttagccactgctggtgtttatgtgaacattcctatcaatccaaattccctctggagtttcatgttatgcctgttgcaggcaaatgtaaagtctagaaaataatgcaaatgtcacggctactctatatacttttgcttggttcattttttttcccttttagttaagcatgactttagatgggaagcctgtgtatcgtggagaaacaagagaccaactttttcattccctgcccccaatttcccagactaaattcaagctaattttctttttctgaagcctctaacaaaagatctangttcanaaggaagcaaaaatcccttaaatctattgtgcacccgttgggaccaatgcccttaattnaaagaattttaccttcgggccgcnanccccctaaggggcgaaattccacac

SEQ ID NO: 1424 - DNA, 284 bp, Homo sapiens
ccctcggagaccaacccctatatatttaatggtgactttgtggaccgaggctccttctctgtagaagtgatcctcacccttttcggcttcaagctcctgtacccagatcactttcacctccttcgaggcaaccacgagacagacaacatgaaccagatctacggtttcgagggtgaggtgaaggccaagtacacagcccagatgtacgagctctttagcgaggtgttcgagtggctcccgttggcccagtgcatcaacggcaaagtgctgatcatgcacggagg

SEQ ID NO: 1425 - DNA, 243 bp, Homo sapiens
gaaccgtcttcgcaggtacttgaggacatagagggggaggcagctgaccagagtgatgacggagactttccacaagaatgacaaggtggcgatgaagtacacatcgatgaactcgtgtaagaacaccagggaggcgatgtagcaggccaggctgagcagctccgccactgtcatgagccagtgccaggtctggatggtcagcgccaccatgagcagctcggtgaggatcagcgaggtgaagga

SEQ ID NO: 1426 - DNA, 123 bp, Homo sapiens
ccaggaagtgggccgggaaggccgggatgaccagggggctgaaggggagtgcagcctggcccttcaaggggcccggggtgccagtgaagttcagcgggcagtgcagcatggtgcccctgtagg

SEQ ID NO: 1427 - DNA, 419 bp, Homo sapiens
  misc_feature 271, 315, 335, 337, 361, 365, 367, 371, 376, 384, 405, 409: n = A,T,C or G
cctgtcagagtggcactggtagaagttccaggaaccctgaactgtaagggttcttcatcagtgccaacaggatgacatgaaatgatgtactcagaagtgtcctggaatggggcccatgagatggttgtctgagagagagcttcttgtcctacattcggcgggtatggtcttggcctatgccttatgggggtggccgttgtgggcggtgtggtccgcctaaaaccatgttcctcaaagatcatttgttgcccaacactgggttgctgaccanaaatgcccaggaagcttaataccatttccagtgtcataccccangggtgggtgaccaaaggggncnttttgaactgtggaaaggaacatncaanancttnttggnccttaaanaattgggggtggttgaaaggntccnattggggaaa

SEQ ID NO: 1428 - DNA, 691 bp, Homo sapiens
  misc_feature 439, 508, 523, 526, 539, 561, 575, 582, 584, 602, 614, 623,626, 645, 648, 664: n = A,T,C or G
cctgggtggtggagcgaatgggccgattccaccggatcctggagcctggtttgaacatcctcatccctgtgttagaccggatccgatatgtgcagagtctcaaggaaattgtcatcaacgtgcctgagcagtcggctgtgactctcgacaatgtaactctgcaaatcgatggagtcctttacctgcgcatcatggacccttacaaggcaagctacggtgtggaggaccctgagtatgccgtcacccagctagctcaaacaaccatgagatcagagctcggcaaactctctctggacaaagtcttccgggaacgggagtccctgaatgccagcattgtggatgccatcaaccaagctgctgactgctggggtatccgctgcctccgttatgagatcaagggatatccatgtgccaccccgggtgaaagaagtctatgcanatgcaggtggaggcagagcgggcggaaacgggccacagttctagagtctgaggggacccgaaagtcggncatcaatgtgggcanaangggaagaaaacanggcccagaatcctggccttccnaaacaaaaaaaggntgaacanantaaatcaggcaccagganaagcccattgcngtttttgcnaangccaaggttaaaactgaanctnttcgaatcctgggtgnacttttaccaacttaatggaaatcagg

SEQ ID NO: 1429 - DNA, 125 bp, Homo sapiens
aaactgttgtgccagtgcttaggctttggaagtggtcatttcagatgtgattcatctagatggtgccatgacaatggtgtgaactacaagattggagagaagtgggaccgtcagggagaaaatgg

SEQ ID NO: 1430 - DNA, 116 bp, Homo sapiens
aaatatttatgtggaattaattaaaggtagttggctatatcgctatcatttcattcttttgacattatgtgaatattttactggaaaataagactaataaattgttaaaagttttt

SEQ ID NO: 1431 - DNA, 241 bp, Homo sapiens
  misc_feature 202, 208, 213, 218, 220, 228: n = A,T,C or G
caagggtcatgatggcaggagtaatcagaggtgttcttgtgttgtgataagggtggagaggttaaaggagccacttattagtaatgttgatagtagaatgatggctagggtgacttcatatgagattgtttgggctactgctcgcagtgcgccgatcagggcgtagtttgagtttgatgctcaccctgatcagaggattgantaaacngctangctanangtggctanaataaataggagg

SEQ ID NO: 1432 - DNA, 133 bp, Homo sapiens; identical to SEQ ID NO: 1374

SEQ ID NO: 1433 - DNA, 234 bp, Homo sapiens
ccacagctgggcgcttcacccagtggtactttggtgcctactccattgtggcgggcgtgtttgtgtgcctgctggagtacccccgggggaagaggaagaagggctccaccatggagcgctggggacagaagcacatgaccgccgtggtgaagctgttcgggccctttaccaggaattactatgttcgggccgtcctgcatctcctgctctcggtgcccgccggcttcctgctgg

SEQ ID NO: 1434 - DNA, 294 bp, Homo sapiens; identical to SEQ ID NO: 773

SEQ ID NO: 1435 - DNA, 674 bp, Homo sapiens
  misc_feature 197, 212, 218, 320, 343, 538, 539, 610, 612, 627, 632, 639,645, 647, 662, 666: n = A,T,C or G
aaagatatgaacagcttaattttccgtgtgattatctaattaaaaaagaaaaacaaaacaagcaaaatgttcaagttaaaaaaaaaacataccgggtgagcaatgcactaaaattatccacatgaaaacaaatggtctgtaatcttataaaccaacatagcatttcactgtcaacaatgtgaaaatttaatatcttntcaaacaggcataanatgaanaagtgctattttttaattgtaaaaggaacttatgtaatgtaaaattacattataatttttcattccgaattgacaaatgatttcaaaaacaaggatcaaagnttgactgcaaatagtaatgcaanataatttcataaaaatccttcaatttctatttttttccttttctgtagttgacatatgaagaccacttcaatttctaaaaaagggaaccattccaattttccctccccaaaaaaatgtctcacaattacaaagtagaaaaacagccgttcataaatgcaaaaaaattctggatttatacatgaaaaaatttctanntccattcaacttattggatggcttttgttgagtttaacctcggccgggccccccttaagggcgaattccancncccttgcggccgttnctagngggatcncacttngncccaagcttgggggnaatntgggcata

SEQ ID NO: 1436 - DNA, 451 bp, Homo sapiens
  misc_feature 315, 389: n = A,T,C or G
ccactctgcccaggagctgccgaccatcaggacgcctgcagacatttacagagcctttgttgatgttgtgaatggagaatatgtccctcgcaaatccatcctgaagtctcgaagtagagagaatagtgtgtgtagcgacactagtgaaagcagtgctgctgaatttgatgataggcggggagttttgaggagtatcagctgcgaagaagccacttgcagtgacaccagtgagagcattttggaagaggaaccacaagaaaatcaaaagaaacttttgcccttatcagtaacacctgaggctttttctggaactgntatagaaaaagaatttgtatcaccttccttaacaccacccccagccattgctcatcccgcactacccactattncagaacgaaaggaagttctgttggaagcatctgaagaaactggaaagagggtttcaaagttt

SEQ ID NO: 1437 - DNA, 721 bp, Homo sapiens
  misc_feature 2, 22, 98, 410, 425, 437, 451, 458, 470, 475, 477, 497, 505,554, 565, 585, 586, 588, 601, 611, 619, 627, 633, 643, 650,655, 665, 673, 675, 680, 698, 704, 706, 714, 718: n = A,T,C or G
cnggcaccgttttttgtaaggnatctctttaagcgcctgggaccccaagcgagagtccgaaattagcagagcgctaaaaggaggggcccgaaggcagnggggctttgagctagaagcctctttttacctgcttgacaggtaatttctgtaattggttgtgattgaatttgatagggtagagaattaaatgagggaagctgtgtatacttcctagtaagagctattatatgactgattacattaacatcatatggaaaaaaattgtcaaaagtactccgggaaagcccttaaatagttggtaaagtacagaacacatgattgtcaatatatgtaaatacaggatgagctaggacagaggggcccttctttcacaccacttaaattagtttcccactttacctttgtttganattgacttcttgganaagtaaatgcanatagacttaaactntcttaantcaggggaaaanttganancttgactggttacaaataantaacggancccaaatgcagtaaaaacagccttgttttttaaggcaaagggtttttgngggggtttttnctaaaattaaaaaggatggnntnctacctgctcttntttttggaantaactagnggaattanaaagcnttttcaattntaaaatnattcnccattttgangggggggnanccaanggggggttgggttttttntttacncnctaaaaantacngcc

SEQ ID NO: 1438 - DNA, 365 bp, Homo sapiens
cctctgcctgctggggattactcgatcaaaaccttccttccctggctacttcccttcctcccggggccttccttttgaggagctggaggggtggggagctagaggccacctatgccagtgctcaaggttactgggagtgtgggctgcccttgttgcctgcacccttccctcttccctctccctctctctgggaccactgggtacaagagatgggatgctccgacagcgtctccaattatgaaactaatcttaaccctgtgctgtcagataccctgtttctggagtcacatcagtgaggagggatgtgggtaagaggagcagagggcaggggtgctgtggacatgtgggtggagaagggagggtgg

SEQ ID NO: 1439 - DNA, 406 bp, Homo sapiens
ccaagacagtccacttacatggatcgtgtcttcaagcaatttgtgcaagccatggttgagcatggacatgaactctcttaacatgtagttctttgggtgcattttgtctgaaccacaattgtgaaggcagctcagcttagtgcacaaattttaactgttgtatataaagcaaataagtcagcagatgggtgaagaggtccagaatgatatgcaaaaactactttttagagaaacaaaacaactttgtagcaacaaattaaatatagtattagattgttacttacgtagattttatttttactatgccttaccaagtacatccttaaacaaagtagtatgtacatgaaattgcacttaaccaaaactattgtgtaaaacaaattttaattcctcagggttttaattt

SEQ ID NO: 1440 - DNA, 222 bp, Homo sapiens
aaactacagagggttttccagctattatttcctttagtttctaaaagtaacgacttatattaatgttttataaaagatagtgatgaaaaaaaggtaatgctgaaataaaggcgcttttagaaatatttaaggacaacataaggtattaatattggaaaaaaactgtacatattttcaagcacaacactgaaatattgcagcagtgtttaactgaattgtttt

SEQ ID NO: 1441 - DNA, 725 bp, Homo sapiens
  misc_feature 473, 483, 523, 532, 534, 559, 574, 579, 586, 592, 598, 602,642, 643, 655, 661, 680, 685, 699, 700, 703, 721, 725: n = A,T,C or G
ccaccacacccaattccttgctggtatcatggcagccgccacgtgccaggattaccggctacatcatcaagtatgagaagcctgggtctcctcccagagaagtggtccctcggccccgccctggtgtcacagaggctactattactggcctggaaccgggaaccgaatatacaatttatgtcattgccctgaagaataatcagaagagcgagcccctgattggaaggaaaaagacagacgagcttccccaactggtaacccttccacaccccaatcttcatggaccagagatcttggatgttccttccacagttcaaaagacccctttcgtcacccaccctgggtatgacactggaaatggtattcagcttcctggcacttctggtcagcaacccagtgttgggcaacaaatgatcttttgaggaacatggttttaggcggaccacaccgccacaacggcacccccataaggnataggccaanaacatacccgccgaatgtaggacaagaagctttttttcanacaaccatntnatgggccccctttccaggaaacttntggagacatcatttnattgncatcccngtgggnctggangaanaacccttacaagtttcaggggttcttggaaattttaccannggcccttttganaggaanctttgggcggcgaaccccncttangggggaaatccaannccnattgggggcgttttttangggn

SEQ ID NO: 1442 - DNA, 294 bp, Homo sapiens
ccatgacagcagctactgcttcacatagcagcatacgccacatgttcaccttcaatatttttccagtctgtctatctttctccacacagtagcagctatcatagaactctgtgaaagcagttgccagctcatatatataatcacagagagtgtggagaaataagtcatctaaaatcttttgcagaatctcagggaaccgtaaaatgcaccggcctagtttccattccttctcatgatccaaaagaatcttggtttctcgagcagctttttggagcatttcttcatcaatattgg

SEQ ID NO: 1443 - DNA, 390 bp, Homo sapiens
ccaggcgctccttgtcggcatcagggagggtggccttgaactgctcatgggctgtggtcagtccctggatctcctcaatggtgtgcacaatgaaggtgtcctgcaggtcctccatggccccctccatccagttgttgaagggtgcagcccgcttggcatactccaagtacagctggtcaatggtctccagcagtttctcggtccgctccagagcttcccttcgcttctgagttagggcccccagattgtcccactggtcacagatcttttggcaacgggcgttgacactgggtgagtcataatagtccagctcattgagctcctgtgcgatggcggcaatctgctccacacggtcctggtgggcagccaggtcactctcgaaggacctcg

SEQ ID NO: 1444 - DNA, 156 bp, Homo sapiens
  misc_feature 113, 124, 131, 133, 142, 145, 149: n = A,T,C or G
aaaactaatgttacaaatctgtattatcacttgtatataaatagtatatagctgatcattaataaggtgtataagtacaatgtattctaaaactgttaagcaaaaaaaaaaancaaaaaaaaantccaggngncctcctccnccnctcnccctggg

SEQ ID NO: 1445 - DNA, 706 bp, Homo sapiens
  misc_feature 480, 523, 558, 563, 586, 588, 590, 596, 598, 614, 615, 624,631, 646, 686, 698, 703, 704, 705: n = A,T,C or G
ccttcgagaagatccctagtgagactttgaaccgtatcctgggcgacccagaagccctgagagacctgctgaacaaccacatcttgaagttagctatgtgtgctgaagccatcgttgcggggctgtctgtagagaccctggagggcacgacactggaggtgggctgcagcggggacatgctcactatcaacgggaaggcgatcatctccaataaagacatcctagccaccaacggggtgatccactacattgatgagctactcatcccagactcagccaagacactatttgaattggctgcagagtctgatgtgtccacagccattgaccttttcagacaagccggcctcggcaatcatctctctggaagtgagcggttgaccctcctggctcccctgaattctgtattcaaagatggaacccctccaattgatgcccatacaaggaatttgcttcggaaccacataattaaagaccagntggcctctaagtatcttgtaccatggacagaccctggaaactntgggcgggaaaaaaactgaaagtttttgtttatcnaatancctttggattgaaaacacttgantngnggcccncnacaaaaagggggaggnncgggacccnttcccanggacccgggggtgancccccaatggggacttgtatggatgtccttaggggaaaanccttaactgctnggagnnnc

SEQ ID NO: 1446 - DNA, 503 bp, Homo sapiens
  misc_feature 151, 154, 213, 390, 400, 402, 420, 424, 432, 442, 449, 457,460, 469, 475, 478, 483, 495, 497: n = A,T,C or G
cctcaaaataagatgaaaaagtctcctgtgggtagctggtgttcctttttcaacttggggaaatcatcatctgtttctaaacgaaagctgcagcggaatgagagtgagccttcagagatgaaagccatggctctgaaaggtggcagggcanaangaaccctccgttcagctaaaagtgaggagtctcttacatctctccatgcagttgatggngattctaagctcttccgacccagaagacccagatcttccagtgatgcactgtctgcctcttttaatggagaaatgctggggaaccgctgtaactcctatgataatctgcctcatgacaatgagagtgaggaggaaggagggctgcttcatatcccagcccttatgtctcctcattcngcctgaggangntgactttgacccaccagnacanttggagtncccccccctngcttttngatccaantgncattttcantgtagngcnccttnaggcccgaatcngnattggt

SEQ ID NO: 1447 - DNA, 304 bp, Homo sapiens
aaaaaaatccaaatgctggcattgtccagaaaaatttaacaggtttatttataattattataaagttgaaccgctgaaacttgttcactgaaacattttaacttgcattaatgctttacgtctccgcatttatattaaaaattcacacacaaatgaaaatggaaaaactgccaatacctgatttctgtcccctatttttccactcgcaatcatatacttaggtaccttttgaccccatggaaaaaaaatatctaacgttcagaactaccaataacaggaagaagagaaattttttttttttttt

SEQ ID NO: 1448 - DNA, 637 bp, Homo sapiens
  misc_feature 463, 465, 534, 558, 564, 578, 583, 600, 607, 620: n = A,T,C or G
aaaataagttactggtaaatggagttgcattctatagtcacttaataaatattaacaaaatatttataactggaaccttaatgaaatgtatcatcaaatcaggtaaaagcaacttgtccgcagttaccaaagcctagatacgcgttagatgcgccttttccggcctgtgcgtctgctctggttcctctcaggcagcaaagctggggaaggaagctcaggcaggagcctccccgacgccacaacggcacaagcagcagctaaagcaccgcactttgctctgctaaccttttacttaaatgaggttttgccaaatccacatctggaaccacgtcacacccatttgcaaggatgtttgttctttgatgaaactgcatctctactgcacatgagggccttcattgtaggacaagaggagagttcgtttatttttgtaactggtttacatgttccgattagttaatcngnagcttattgtcatttgctatgcctgggggcttctaatctctcctttactaaaacattacttcaaatttnaaattgacccttggttataatttnttaccnggaatttgggtgtnattgngaacaactcttattcanaaatagngacaactttaacnccaaaagtggtcaccaa

SEQ ID NO: 1449 - DNA, 279 bp, Homo sapiens; identical to SEQ ID NO: 1192

SEQ ID NO: 1450 - DNA, 317 bp, Homo sapiens
  misc_feature 238, 244, 269: n = A,T,C or G
aaaatcacaaacattaacggcagtaggcaccaccatgtaaaagtgagctcagacgtctctaaaaaatgtttcctttataaaagcacatggcggttgaatcttaaggttaaattttaatatgaaagatcctcatgaattaaatagttgatgcaatttttaacgttaattgatataaaaaaaaacaacaaaattaggcttgtaaaactgactttttcattacgtgggttttgaaatctanccccanacatactgtgttgagagatacttanagggagggagtaggttttgaagaggttgatggtggtggggagggaagg

SEQ ID NO: 1451 - DNA, 297 bp, Homo sapiens
ccaggtctccaccaggcaccacagtgggaggctggtagttgatgccaaccttgaagccagtggggcaccaatccacaaactggatgctgcgcttggttttgatggtggcaatggcagcattgacatctttgggaaccacgtcaccacggtacaacaggcagcaagccatgtatttaccatggcgagggtcacatttcaccatctggttggctggctcaaagcaagcattggtgatctctgctacagaaagctgttcatggtaggctttctcagcagagatgacaggggcatatgtgg

SEQ ID NO: 1452 - DNA, 445 bp, Homo sapiens
aaactttgaaaccctctttccagtttcttcagatgcttccaacagaacttcctttcgttctggaatagtgggtagtgcgggatgagcaatggctgggggtggtgttaaggaaggtgatacaaattctttttctataacagttccagaaaaagcctcaggtgttactgataagggcaaaagtttcttttgattttcttgtggttcctcttccaaaatgctctcactggtgtcactgcaagtggcttcttcgcagctgatactcctcaaaactccccgcctatcatcaaattcagcagcactgctttcactagtgtcgctacacacactattctctctacttcgagacttcaggatggatttgcgagggacatattctccattcacaacatcaacaaaggctctgtaaatgtctgcaggcgtcctgatggtcggcagcttctgggca

SEQ ID NO: 1453 - DNA, 302 bp, Homo sapiens
  misc_feature 161: n = A,T,C or G
ccttggcatctctagcccaagctgaggccagatctctccactggagaataggagctgatttcctgctccttccaaccaaagaactgagaagccaggtagatccctgctctcagcctagccatgccggaacccgcgggactttagctaaagcagcttgtgtnactgaagctggacagaacaggcttcttgtaccctaaacaagctacccagactcttcagctccttaaggccgagcccttgtctcactccaggagggcactgggcttcttaatgctttcacccctccgaacacacaccgtttt

SEQ ID NO: 1454 - DNA, 372 bp, Homo sapiens
ccttagggcgggaacacttttcaacccaagccaggcttcaggggcaagcccaccaacagaccccaatttccacaggggaggcagatcttctatacctacagtgacagaaaatacactaaagtgcagtataaaatataaaaaggtttgattctgaatagaccaactgctaattttccttaaaaaaatttttaatttggttgagtaaaaaccaaattagttcactgaatctcattttgtaggtaagagtcttatttgcaatacaaaaactggagcttatgactgctttgattttctctgtagcacaggataaccagtattagtggagaacactacaaaaggtggcttgtggtgagttctttgcatagtggtttt

SEQ ID NO: 1455 - DNA, 310 bp, Homo sapiens
cctacagacttatttcttcttggacacacccacggtgcggccacggcggccagtggtcttggtgtgctggcctcggacacgaaggccccagaggtgacgcagccctctatgggcccgaatcttcttcagtcgctccaggtcttcacggagcttgttgtccagaccattggctaggacctggctgtattttccatcctttacatccttctgtctgttcaagaaccaaatctgggatcttgtactggcgtggattctgcataatggtgatcacacgttccacctcatcctcagtgagttctcccgccctctt

SEQ ID NO: 1456 - DNA, 344 bp, Homo sapiens; identical to SEQ ID NO: 114

SEQ ID NO: 1457 - DNA, 332 bp, Homo sapiens
ctggtatttttcatctcttctttcgatatgaagctcagattcaaagctgcttctttacctgaagattgcaagcctgctacttcccctggatttggctcttctgaagatttgaaagtcccagactatcttgctcaggaatgtcgtcgtttttaggtatttggaaaacagggctgcttttgattctgtaccaccccaaatgtatgagcccaactaaagggaccataacaaccaaaactttgtagtctctccacaagttccgaaggctcatagtacttcagcatcagtgtacctgcgcaccagccgtcgcgccgccccaggccgccaccgccaga

SEQ ID NO: 1458 - DNA, 540 bp, Homo sapiens
  misc_feature 495, 540: n = A,T,C or G
ctgaaagagctattgaaaaaatgaatggaatgctcctaaatgatcgcaaagtatttgttggacgatttaagtctcgtaaagaacgagaagctgaacttggagctagggcaaaagaattcaccaatgtttacatcaagaattttggagaagacatggatgatgagcgccttaaggatctctttggcaagtttgggcctgccttaagtgtgaaagtaatgactgatgaaagtggaaaatccaaaggatttggatttgtaagctttgaaaggcatgaagatgcacagaaagctgtggatgagatgaacggaaaggagctcaatggaaaacaaatttatgttggtcgagctcagaaaaaggtggaacggcagacggaacttaagcgcaaatttgaacagatgaaacaagataggatcaccagataccagggtgttaatctttatgtgaaaaatcttgatgatggtattgatgatgaacgtctccggaaagagttttctnctttggtacaatcactatgcaaaggttatgatgggaggtggcccn

SEQ ID NO: 1459 - DNA, 223 bp, Homo sapiens
aaatcctatgtccaattcaagcctatctaactacatttggtaggattaacatttcatataacaaatggggcttaattaaaaactttaacttggaataaaggaacagggatcactttatcttctgccttcatttaccttagtccaagattcttgcaaaacaggcaactgaacaaacattaggtttatgtaggtaaaatgtgaaagcatttctcctccacttttt

SEQ ID NO: 1460 - DNA, 368 bp, Homo sapiens
gtgatccgcctgccttggcctcccaagtgctgggattacaggcgtgagccaccatgcccggctgcaatcacgtatgagtttttctaaaaaaaccgaaacactggaaacatggatgcatcttaaagactttatgctaagtgaaaccagtcacaaaaggacaaatactgtatgattccacttacatgagaaatatgagtagtgaagttgatgatagagacaaaaagtatggctgctgctaggggaaggggaggtggggagttattgttcaatgggcacagaatttgggaagatggaaaacttctggagatggatgatggtgatggctggacaacaatgagaatgtacttaatccactgaattgcatattt

SEQ ID NO: 1461 - DNA, 290 bp, Homo sapiens
  misc_feature 241: n = A,T,C or G
aaactcatttttaattgacaatcttggaatgagaggtcacaaaagggcactaatttctatttttcaactgcagccaagcaaaataaacatgtgttgtggctctatataccccactctttaagctacctgccaggaagaagaatttcctcataaatactaagcaactttttcattacactgaaataaattgaagaaaatggagatttatttattcaatcagtttactttctgcaaaggtggncattgtcattggtcatcttaaacctaaactgttgtattgaaaaatattt

SEQ ID NO: 1462 - DNA, 535 bp, Homo sapiens
  misc_feature 501, 503, 515, 522: n = A,T,C or G
ctgtgagaaattagaaaaacaaagggaagagagtctgcacagatgaattgagagggttcaggggagaatttggacttgtttgtgcctgttggatacaggctgcaaaagaaaatttcttctctgctcctatttgaaaaccagaaagcttgtaccccagatcttagtgttgatgctccaggaattacttaccagtgactatgatcgtcttgactgtggtcctgttgcagccagtgactgagttataggcctggcaggtatagagtccgctgttcttctcagtgatgttggagataaagagctcttgtgtgtgttgctggatgttcccatcaatcagccaagaatactgtgcaggtgggttagaggctgcatggcaggagaggctgaggttcacccctggacggtaataggtgtatgagggggaaatggtggggtcgtctgggccatagaggacattcaggatgactgggtcgctgtggtcaacacttaattcgttctggattncnactcataggggncctactnattcttgtgacct

SEQ ID NO: 1463 - DNA, 484 bp, Homo sapiens
  misc_feature 341, 342, 357, 362, 371, 401, 418, 421, 441, 457, 472: n = A,T,C or G
ctgtttcataggctggagatgcactcttctagactgctcgagacagccagagacaggggaggagggaagaaggatactgtggaaagggatggcggggcaaacatttagagctagaagccactactgggccaatgctaaagtttctgtctctaagcctaaaaaagccagtgtagtagggcccttatcactcttagtttgctaggtttcccctctgaaataatgagcagatttagccaggctagcagaaaggaagaggacggggctgtgcaggagttagcacaatcttgattcttgctctatggcgggacttgcacaggaagtgttggcgcttgctgcattcnntgctgctccaagttnaaaanttgttattngtagctcatttcagcacagtgcttgttccnacccatggactttgccncancacggatcttgttcagaatncttggccccctcaatncccctgcccctgctncctcttctgggg

SEQ ID NO: 1464 - DNA, 267 bp, Homo sapiens
ccaagacatccaggtcacagcagattcgggcacgtgtggaagaaggttggatgatgtcatccacaaaccctcgcactgctgcggggaaagggttggcaaacttctcgatgtactctgcctgagcagcttccacattctcatgccctttgaagatgatctccacagcgccctttgctcccatgactgcaatctctgcggtgggccaggcatagttggtatcaccacaaaggtgcttagagctcatgacatcataggcacctccatagg

SEQ ID NO: 1465 - DNA, 231 bp, Homo sapiens
cctagacagctcctgggcagccagagtcagcacatccaggatgtccatgcgctgccggaggctgtagttgagggcatagaactgtgaggtcagatagtcggccaccggggccgggtctgtgaccgtgacggccaccagggctctctggcgcagccctgcaaatcccaccacacaggtcttctcctccagatgcagaagcaccttggacctgcccggcggccgctcgaaggg

SEQ ID NO: 1466 - DNA, 202 bp, Homo sapiens
gacaacagagagtgggaattccaaaagtatgggcactaggaaaagacttcttccatcaagcttaattgttttgttattcatttaatgactttccctgctgttacctaattacaaattggatggaactgtgtttttttctgctttgttttttcagtttgctgtttctgtagccatattgtattctgtgtcaaataaagtccag

SEQ ID NO: 1467 - DNA, 97 bp, Homo sapiens
cccttgggcggccgccgggcaggtgtacaagcttttttttttttttttttttttttttttttttttttttttttttttttttttttttttttttttt

SEQ ID NO: 1468 - DNA, 342 bp, Homo sapiens
aaagacctgaacttcttttatgatctttaatgattatttgttctaatctttgacttggaaacccaaattattttcagtctaacgtacttgaaatttaactattaaaaaagttggaggaactcaaactttgaagttagggctccctttctccagataaagcacattgcctggtttattgtaaggcacttagaacatgtaaccaaaaacactcaatttaggaataggaatgattgttttacagctaagtgcgctctcagagtcttttgttttacacccctctcaagtttacctttagatatttttcttgttgtttaatattttgtgacagatttggcaactttt

SEQ ID NO: 1469 - DNA, 308 bp, Homo sapiens
aaatttttgtagataaggggtcttgctatgttgcccaggctagtctcaaactcctggcttcaagtgttcctactgtcatgacctgccaacatgctggggttacaggcatgagccaccatgccccaaacaggtttgaacacaaatctttcggatgaaaattagagaacctaattttagctttttgatagttacctagtttgcaaaagatttgggtgacttgtgagctgtttttctgttgaaattgaagagcgaggggtcaagctacgcctgacagtggtagatacccctggctatggtgacgctatcaa

SEQ ID NO: 1470 - DNA, 284 bp, Homo sapiens
ttgaacttgacctcagggtcttcgtggctcacgtccaccaccacgcatgtgacctcaggggtccgggagatcatgagggtgtccttgggttttggggggaagaggaagactgacggtccccccaggagttcaggtgctgggcacggtgggcatgtgtgagttttgtcacaagatttgggctcaactctcttgtccaccttggtgttgctgggcttgtgattcacgttgcagatgtaggtctgggtgcccaagctgctggagggcacggtcaccacgctgctgag

SEQ ID NO: 1471 - DNA, 490 bp, Homo sapiens
  misc_feature 459: n = A,T,C or G
aaaaaatgcactgagtttgggttaaaaaccaaccaccaaaatggatttcaacacagctctaaagccaagggcgtggccggctctcccaacacagcgactcctggaggccaggtgcccatgggcctacatcccctctcagcactgaacagtgagttgatttttctttttacaataaaaaaagctgagtaatattgcataggagtaccagaaactgcctcattggaaacaaaaactatttacattaaataaaaagcctggccgcaggctgcgtctgccacatttacagcacggtgcgatgcacacggtgaccaaaccacggaggcagcttctggcactcacaccacgagccgcacgtttgccacatgagagtaaagcagagggcaagaggagtgagagggaggggggtcgcgttcacttctggttccggagctgattggacagccagccagtccttcatanagcccgtcgccgctggtggcgcagacctcgg

SEQ ID NO: 1472 - DNA, 286 bp, Homo sapiens
gtttgtgacatatttctgtgagcaggttctccctaacctcggtaccttgactaccccagtggaaggtcttgatatacagttggaggtattgaaattgttggcggagatgagttcattttgtggtgacatggaaaaactagaaacaaatttaaggaaactatttgataagttattggaatacatgcccctccctccagaagaggcagaaaatggagagaatgctggtaatgaagaacccaagctacagttcagttatgtggaatgtttgttgtacagttttcaccag

SEQ ID NO: 1473 - DNA, 230 bp, Homo sapiens
ctgtgcgtgctcacgggctcctcctgctggaagagagagagatgtgcacgccactcctatggcatgtctagcaggtctgagcagtgttcatagaagaaaaatgttttaacagtctcagattttgggaggtagggggaaaaaaatcattgaaatctgggaaagacatttttaagctgctgacttcacctgcaaaatctaacaggttggattagttttttttttttttttaa

SEQ ID NO: 1474 - DNA, 330 bp, Homo sapiens
cctggcctggctacacactggagactgccaacactcaatgccatgagaagatgccagtgaaggacatctatttccagtcctgtgtcttcgacctgctcaccactggtgatgccaactttactgccgcagcccacagtgccttggaggatgtggaggccctgcacccaaggaaggaacgctggcacattttccccagcagtggcaatgggactccccgtggaggcagtgatttgtctgtcagtctaggactcacctgcttgatccttatcgtgtttttgtaggggttgtcttttgttttggttttttattttttgtctataacaaaatttt

SEQ ID NO: 1475 - DNA, 197 bp, Homo sapiens
ccaagcaaggccagatggatgctgttcgcatcatggcaaaagacttggtgcgcacccggcgctatgtgcgcaagtttgtattgatgcgggccaacatccaggctgtgtccctcaagatccagacactcaagtccaacaactcgatggcacaagccatgaagggtgtcaccaaggccatgggcaccatgaacagacag

SEQ ID NO: 1476 - DNA, 326 bp, Homo sapiens
ctgctggccgtggcgggtgccgagggcccggacgaggattcttctaacagagaaaatgccattgaggatgaagaggaggaggaggaggaagatgatgatgaggaagaagacgacttggaagttaaggaagaaaatggagtcttggtcctaaatgatgcaaactttgataattttgtggctgacaaagacacagtgctgctggagttttatgctccatggtgtggacattgcaagcagtttgctccggaatatgaaaaaattgccaacatattaaaggataaagatcctcccattcctgttgccaagatcgatgcaacctcagcgtc

SEQ ID NO: 1477 - DNA, 538 bp, Homo sapiens
  misc_feature 511, 538: n = A,T,C or G
ccataaagggcaaccaagagagccccaaagccactggagtctttaccacactgcagcctgggaggtctattccaccttacaacaccgaggtgactgagaccaccattgtgatcacatggacgcctgctccaagaattggttttaagctgggtgtacgaccaagccagggaggagaggcaccacgagaagtgacttcagactcaggaagcatcgttgtgtccggcttgactccaggagtagaatacgtctacaccatccaagtcctgagagatggacaggaaagagatgcgccaattgtaaacaaagtggtgacaccattgtctccaccaacaaacttgcatctggaggcaaaccctgacactggagtgctcacagtctcctgggagaggagcaccaccccagacattactggttatagaattaccacaacccctacaaacggccagcagggaaattctttggaagaagtggtccatgctgatcagactccttgcacttttgatacctgatnccggcctggagtcaatgtcagtgttcn

SEQ ID NO: 1478 - DNA, 288 bp, Homo sapiens
  misc_feature 122: n = A,T,C or G
ctgtagccaaaaagatgctggggcagattgtggacaagtagaagcacctccttcccctctgcgacattgaacggcgtggattcaatagtgagcttggcagtggtgggcgggttccagaaggntagaagtgaggctgtgagcaggagcctctgccaggggatgcaccatctgtggggaggggccgagggagactccatggtctctgctgtctgctctgtcctcctctgtggagaagagcttgagttccaggaacgttttgtcaaggctgctgtgactgtctggtctgct

SEQ ID NO: 1479 - DNA, 141 bp, Homo sapiens
cctctgtgggcgtccgttcatcctggaaagagcttccggaatttgccgtaggctgagttgctgatgatgaccctcacgtcggccgccccgtcctcagggatcacgtccacctcctgaactgtggcctccttatacagccag

SEQ ID NO: 1480 - DNA, 388 bp, Homo sapiens
ccaatgtggtgaaaccgcgtctctattgaaaatacaagaattagccagatgtggtggtgggcgcctgtaatcccagctactcaggaggctgaggtgggagaattgcttgaacccggaaggcagaggttgcagtgagccgagatcacgccactgcactccagcctgggcgacagagcgagactccatttcaaaaaaaagaactacaagttctgattccggactcccagatgtgagttttaatctcctctccactgattgatcctgactaatcactagccccctgtgcccaatttcaacagtatgctggagtcaaatctgaaccccaaactatgccctcttaaggggggtccctctgggatgccaacatgcattcacttcttcacctggc

SEQ ID NO: 1481 - DNA, 541 bp, Homo sapiens
cctaggggtccgggtacatgcagtgagtccttggggcagggccagccctgctgactacacaagcaaggttggtggtgagacaaggggtgtatgtttccccgccaggacagagggcaacacacaggtgggtggcgaccctcaaggctgacggcatccctgcccagagtgacgaccagggcctactagctctactaaattcagggtggcggaaatcctggatgtgccccttgtcatggctcaggggcctcctttcatcctagttcatgaagccccaacacttcctccctgggatcagtaccaatcccctgcaaggccctgcccctccctccaacttcatcccagtcaaccacacacgtccaatcgtgtagtctgttgcccttctttccttcctggggcatcctgagccctctgggatggcgtgtgcccagtatcagctcacggacctccatggcccatccaccaagcaccccatcgtatcaacttgccatgtaagggtgtggaccccttccccgctcatggatgctctggtggcctccactgg

SEQ ID NO: 1482 - DNA, 424 bp, Homo sapiens
aaagtatttcatagaataagtcctttggtatgcagatgctacatggaaggaaagaaagaaaaaaagaaagcacacaatattacttgctccataccctaaactgccgataccacagccgtaaaatgaaggtgtctagtagttgttatagcacggtagtccattctttctaaaggaccacttacggttcatgcaggtaattttaggtatagcccatcttccatttcctaagcaccggatagttggaaggtgacgttgaatgaaaccatctttgcagtggtatctaatcagggagttgatttcataacgaggtttcatctttccaaaggtcttggcattttctacaacagggggctggccgcaagcaactgttcctttcttgcacgtataggtgagatggtaattgcagggaacatcattccactgg

SEQ ID NO: 1483 - DNA, 431 bp, Homo sapiens
  misc_feature 338, 403, 422: n = A,T,C or G
ctgccccagggttcttcccctggtgattctcgcctgctttctcatctcaggggaggcagtggcacctccctctccctgctgacatgaagagagctatgatatgccactgctgccaactcatcctctgcccccacctcgaaacccacagtccccagtggagggccactactcatccccattggtttcccaggggaggggtgttgtctggaagggcaggttcagatgcagccttccagatttagaggcactgggaggacagtggctgagtggaggcgcccagacctgggcaggcagcaggctcaggcccacaccttgtgatttttgaaaccaaagcccanaagatgatgtttacttctctctccctggctctgcccttcttactgcaaaccatgctgtgccttanggcccttctcataactgtncctcatgga

SEQ ID NO: 1484 - DNA, 99 bp, Homo sapiens
ctgataccagtgagtagcctcgctctagcagggcatctgccatggcccgagcattcttcagaacctgcagggagtactcccggaacatgggggtgcagg

SEQ ID NO: 1485 - DNA, 192 bp, Homo sapiens
cctcagaaattcagcgggtgcctgggaggcttcattcacattcacctctaaggagaggctaaaagaggaatttccagatggcagctactggctcagaaccagggggtcccttgccaagtctgtctctatgtggctcccggaattgctgaggtctcacttctcagagggctttgatggaaaataaagcaacag

SEQ ID NO: 1486 - DNA, 98 bp, Homo sapiens
  misc_feature 29, 35, 48, 57, 68, 71, 77, 82, 88, 89, 94: n = A,T,C or G
ctggcctttctgttgattagcagggagantgacangattgtctgaaangcttttgtncataactgatnccnaagtanttcgngatctnntgaangcgt

SEQ ID NO: 1487 - DNA, 255 bp, Homo sapiens
caggtggtggacgatggcctggagcacagggagctgggccatgggcagcctgaggccagaggccccgctcctctccagcagcaccctcaggtcatagatgtggatgaagttgaggaaacaggagttgttttcagctataacacggattcccgccagacgtgtgctaacaacagacaccagtgctcggtgcacgcagagtgcagggactacgccacgggcttctgctgcagacctgcccggcggccgctcgaaggg

SEQ ID NO: 1488 - DNA, 261 bp, Homo sapiens
ccagcatggcccttcagggcccttatcttggcctggaagtaggtgtacatggtttatgctcttacagaggagaccttgtagataaccactccatgatgaacacaaaatgacaagcatatggctgaactttcaagtgatgtcatcttactactgagaagtgagagagaggtcttaaggggtctttgaatgactatttttaggtacataaaatgctttcctctgttgtctacagcatctcataatctatcctggggaattcag

SEQ ID NO: 1489 - DNA, 344 bp, Homo sapiens; identical to SEQ ID NO: 114

SEQ ID NO: 1490 - DNA, 426 bp, Homo sapiens
caggaacgtgttgagaggcaagtagcagaccttctgcagctcaaactccttgtacactgcctccaacttcttacagcgtttggtagccttttccagttctgttaggatctcgtcatgtctttggaagtagctggtaaactcctttaactggcgcatgttcctgagcaggatgtccccgattcgttgatgactgccttttgtgtgggctttggagggcccttcccagagtgccagcctctgctccacctcgcgcaggaagcctctgtggaactcatagatgggatcgatgttggagaagagcagcgtcatcagagtcgcaggcatggcgtcctccttcaccactgcgctgcggaaccacacggtaataacttctaaatccttgaggtatgttcgttctgtagcgagaatctctttgactatgaagta

SEQ ID NO: 1491 - DNA, 339 bp, Homo sapiens
ctgacattcggccccacggtgtacacatggtgctcaaccagcagggccggccatcgggcgatgccttcattcagatgacatcagcagagcgagccctagctgctgctcagcgttgccataagaaggtgatgaaggagcgctacgtggaggtggtcccctgttccacagaggagatgagccgagtgctgatggggggcaccttgggccgcagtggcatgtcccctccaccctgcaagctgccctgcctctcaccacctacctacaccaccttccaagccaccccaacgctcattcccacggagacggcagctctatacccctcttcagcactgctcccag

SEQ ID NO: 1492 - DNA, 543 bp, Homo sapiens
  misc_feature 362, 363, 406, 473, 480, 490, 498, 507, 509, 522, 525: n = A,T,C or G
ctgcagcctgggactgaccgggaggctctgattatttacccaccacaggtaggttgtgttctgaatctcaggttcacaggttaaggctacagcatcctcatcctccacggggttggagttgttgctggtgatgaagggtttgggtggctcatagactgtgatcgtcgtgactgtggtcctattgaggccagtgtctgagttatgggcttggcacgtataggatccactattattcacagtgatgttggggataaagagctcttgggtggattgctggaaagtcccattgacaaaccaagagtactgtgcaggtgggttagaggctgcgtggcaggagaggttcagattttcccctgatctgnnagatgtgtttagaggggaaatggtgggggcatccgggccatanaggacattcagggatgactgaatcactgccctgggactcactgggttctgggtttcacattttgtancttgctntgtcatttcnttgcgganattgaatanangtgagggtcctgnttnccattggacaaacctcct

SEQ ID NO: 1493 - DNA, 77 bp, Homo sapiens
  misc_feature 69: n = A,T,C or G
cctacctggaccacgtgtgggatgaaggctgtgccgtcgttcacttttttttttttttttttttttttnaaaagggg

SEQ ID NO: 1494 - DNA, 344 bp, Homo sapiens
ctgtccaatgacaacaggaccctcactctactcagtgtcacaaggaatgatgtaggaccctatgagtgtggaatccagaacaaattaagtgttgaccacagcgacccagtcatcctgaatgtcctctatggcccagacgaccccaccatttccccctcatacacctattaccgtccaggggtgaacctcagcctctcctgccatgcagcctctaacccacctgcacagtattcttggctgattgatgggaacatccagcaacacacacaagagctctttatctccaacatcactgagaagaacagcggactctatacctgccaggccaataactcagccagtgg

SEQ ID NO: 1495 - DNA, 380 bp, Homo sapiens
caggacccacggggccatgaggaccaggtgcactgtagtcccagttactcgggaggctgaggcaggagaatcgcttgaacccgggaggtggagattgcagtgagcccagatcgcaccactgcactccagtctggcaacagagcaagactccatctcaaaaagaaaagaaaagaagactctgacctgtactcttgaatacaagtttctgataccactgcactgtctgagaatttccaaaactttaatgaactaactgacagcttcatgaaactgtccaccaagatcaagcagagaaaataattaatttcatgggactaaatgaactaatgaggataatattttcataattttttatttgaaattttgctgattctttacct

SEQ ID NO: 1496 - DNA, 540 bp, Homo sapiens
  misc_feature 471, 495: n = A,T,C or G
cctgaggtgtgtgccactcagagacttcacctaactagagacaggcaaactgcaaaccatggtgagaaattgacgacttcacactatggacagcttttcccaagatgtcaaaacaagactcctcatcatgataaggctcttacccccttttaatttgtccttgcttatgcctgcctctttcgcttggcaggatgatgctgtcattagtatttcacaagaagtagcttcagagggtaacttaacagagtatcagatctatcttgtcaatcccaacgttttacataaaataagagatcctttagtgcacccagtgactgacattagcagcatctttaacacagccgtgtgttcaaatgtacagtggtccttttcagagttggacttctagactcacctgttctcactccctgttttaattcaacccagccatgcaatgccaaataatagaattgctcctaccagacctcgggncgcgaacacgctaagggcgaattncagcacactgggggccgtactagtggatccgactcggtccaagct

SEQ ID NO: 1497 - DNA, 212 bp, Homo sapiens
ttgagtttttaatctcactttgggtttccttgtgaagttggagggaagtttataatagcctaacactaccccacccccaactaggaggaacctctgttttcaagagagatgcctgtcctgtgcttggatagtcagtcaattatttgtgtatgaaacaatgtacaaatcaatgttttgaaaataatgatctcagactttctaagttaaatttt

SEQ ID NO: 1498 - DNA, 204 bp, Homo sapiens
aaaaaaagggtgagctgggagccagactgtgcacatcagccaagattgctattgccaaacggagcccagaagcatccaggtacactttccaacaggcagaccctaccaggaactgggagacaagagcgggctctctcctgagataagacaagtttaacgtgaagaccttttggaaaattcccgggttttcctggctcttttcag

SEQ ID NO: 1499 - DNA, 305 bp, Homo sapiens
aaaattcatggaagtaataaacagtaataaaatatggatactatgaaaactgacacacagaaaaacataaccataaaatattgttccaggatacagatattaattaagagtgacttcgttagcaacacgtagacattcatacatatccggtggaagactggtttctgagatgcgattgccatccaaacgcaaatgcttgatcttggagtaggataatggccccaggatcttgcagaagctctttatgtcaaacttctcaggttgattgacctccaggtaatagttttcaaggttttcattgacag

SEQ ID NO: 1500 - DNA, 547 bp, Homo sapiens
  misc_feature 541, 547: n = A,T,C or G
cctgggctctctgcacctagtgaggtgtgaggctctcttgccacacagttcacactctcacttaactaagccagagttggtggcattattaaattatcactggtcttcttaatagtaaaaatggggaacccagagggcaggaaatttccattaccctatattggggctaaacttaaaagagtatatccactatcaagagcttagtacaaaggctggggtgaagttacattatacctggctttttaccataccagggagcccacctcaacatgactgtggaagaccaaaggatatacctaggttcagattataataaatcacccagcaccacctgaatgtattatccacaaagatatagcaataataaaggttatatatacatatatttatcttggtaacctgagggctaaaaacgtggaatacgataattcttctcaagaggtccatctgtaaagaaagggacccaaaaggacagtgtttgtgttgcataaaatatgggtaaagtgggagttgggaacaaaaggggggtttctttagctcnttcccn

SEQ ID NO: 1501 - DNA, 53 bp, Homo sapiens
  misc_feature 16: n = A,T,C or G
gactcactataaggcnaattgggccctctagatgcatgctcgagcggccgcca

SEQ ID NO: 1502 - DNA, 278 bp, Homo sapiens
cctactctggggatatcatctgactatactcaggacaaactcctattcctttgatatactgctcacttaggattaacactctaatttcagacatagttaagtgacaaggaataaattatcctgatatagcctctgatacatgttaccaggggcatacttctaagctggactttttagaaggaagtgcttcctgttaggtaggaaatttcacctctgctttttactagacctacagaccactgcaattgaggaacataaaaatgaaggatatccttcaa

SEQ ID NO: 1503 - DNA, 591 bp, Homo sapiens
  misc_feature 438, 447, 479, 490, 521, 535, 545, 561, 563, 571, 586: n = A,T,C or G
ctgtggaggccgcttacgtaaagcccaggggacattcaacagcccctactacccaggccactacccacccaacattgactgcacatggaacattgaggtgcccaacaaccagcatgtgaaggtgcgcttcaaattcttctacctgctggagcccggcgtgcctgcgggcacctgccccaaggactacgtggagatcaatggggagaaatactgcggagagaggtcccagttcgtcgtcaccagcaacagcaacaagatcacagttcgcttccactcagatcagtcctacaccgacaccggcttcttagctgaatacctctcctacgactccagtgacccatgcccggggcagttcacgtgcccgcacgggggcgggtgtatcccgaaaggagcttgcgcttgtgatggcttggggcccgacttgcacccgaaccacangcgaatgangctcaaacccttccccggggcgggccgcttcnaaaaagggcgnaaatttccaaccaccacttgggcggggccgnttacctagttgggnatcccgaagnttcgggtacccaaaancnttgggcgntaaattccatggggncaata

SEQ ID NO: 1504 - DNA, 330 bp, Homo sapiens
aaatatgttcacgttacgctggaccaaattaagacggctttctccctcttgctgacgtgccccagccgtgataatgaccagcttggagtttgcagttacattatagtctttgccagagacaatctttggtgttctaaggaaaaggctgccatgttggagatccatcatctctcccttcaatttgtcttcgatgacatcaacaagagcaagttcatctgccaagtccttcattaagatactgatggcacaggccatgccaacagcaccaaccccaacaactgtaatcttattctggggggtctgttcttcctttagaagattataaatcag

SEQ ID NO: 1505 - DNA, 172 bp, Homo sapiens
  misc_feature 105, 107, 122, 131, 136, 140, 145, 152, 156: n = A,T,C or G
gcaattaaccctcactaaagggaacaaaagctggagctccaccgcggtggcggccgcccttttttttttttttttttttttttttttttttttttttttttttgngnaaaaaaaaaaaaaanttttttttnaattngggnaaaanttttttncccnaaaaaaaaaaattttt

SEQ ID NO: 1506 - DNA, 144 bp, Homo sapiens
  misc_feature 120, 129: n = A,T,C or G
ccaaagacccagctgtttcataggctggagatgcactcttctagactgctcgagacagccagagacaggggaggagggaagaaggatactgtggaaagggatggcggggcaaacatttanagctagaanccactactgggccaa

SEQ ID NO: 1507 - DNA, 303 bp, Homo sapiens
  misc_feature 7, 17: n = A,T,C or G
actcttntatactgctngagacagccagagacaggggaggagggaagaaggatactgtggaaagggatggcggggcaaacatttagagctagaagccactactgggccaatgctaaagtttctgtctctaagcctaaaaaagccagtgtagtagggcccttatcactcttagtttgctaggtttcccctctgaaataatgagcagatttagccaggctagcagaaaggaagaggacggggctgtgcaggagttagcagaatcttgattcttgctctatggtcggtacttgcacaggaagtgtt

SEQ ID NO: 1508 - DNA, 52 bp, Homo sapiens
  misc_feature 29, 38, 52: n = A,T,C or G
acagatcctggtctggcaagtccatgggngggaacaancactgtgctgagan

SEQ ID NO: 1509 - DNA, 80 bp, Homo sapiens
  misc_feature 16, 36, 38: n = A,T,C or G
gaccctcactctactnagtgtcacaaggaatgatgnangaccctatgagtgtggaatccaaaacgaattaagggttgacc

SEQ ID NO: 1510 - DNA, 415 bp, Homo sapiens
  misc_feature 26, 60, 68, 79, 111: n = A,T,C or G
agatgcatgctcgagcggcacgccantgtgatggatatctgcagaattcgcccttagcgnggtggttnctgaggtctgnccaatgacaacaggaccctcactctactcagngtcacaaggaatgatgtaggaccctatgagtgtggaatccagaacgaattaagtgttgaccacagcgacccagtcatcctgaatgtcctctatggcccagacgaccccaccatttccccctcatacacctattaccgtccaggggtgaacctcagcctctcctgccatgcagcctctaacccacctgcacagtattcttggctgattgatgggaacatcctgcaacacacacaagagctctttatctccaacatcactgagaagaacagcggactctatacctgccaggccaataactcagcca

SEQ ID NO: 1511 - DNA, 126 bp, Homo sapiens
  misc_feature 9, 23, 45, 48, 82: n = A,T,C or G
aaaggaagncagcaccatagcanagtacataagtggctatcaaanaanccagccgatatggattggcctgcacgacccacanaaaaggcagcagtggcagtggattgatggggccatgtatttgta

SEQ ID NO: 1512 - DNA, 331 bp, Homo sapiens
  misc_feature 8: n = A,T,C or G
ctgtttcntaggctggagatgcactcttctagactgctcgagacagccagagacaggggaggagggaagaaggatactgtggaaagggatggcggggcaaacatttagagctagaagccactactgggccaatgctaaagtttctgtctctaagcctaaaaaagccagtgtagtagggcccttatcactcttagtttgctaggtttcccctctgaaataatgagcagatttagccaggctagcacaaaggaagaggacggggctgtgcaggagttagcagaatcttgattcttgctctatggtccggtacttgcacaggaagtgttggcgc

SEQ ID NO: 1513 - DNA, 350 bp, Homo sapiens
cctgtcgatatggattggcctgcacgacccacagaagaggcagcagtggcagtggattgatggggccatgtatctgtacagatcctggtctggcaagtccatgggtgggaacaagcactgtgctgagatgagctccaataacaactttttaacttggagcagcaacgaatgcaacaagcgccaacacttcctgtgcaagtaccgaccatagagcaagaatcaagattctgctaactcctgcacagccccgtcctcttcctttctgctagcctggctaaatctgctcattatttcagaggggaaacctagcaaactaagagtgataagggccctactacactggctttttt

SEQ ID NO: 1514 - DNA, 170 bp, Homo sapiens
  misc_feature 67, 85, 87, 94, 97, 164, 165: n = A,T,C or G
aatacgactcactatagggcgaattgggccctctagatgcatgctcgagcggccgccagtgtgatgnatatctgcagaattccancncactggnggncgttactagtggatccgagctcggtaccaagcttggcgtaatcatggtcatagctgtttcctgtganngttct

SEQ ID NO: 1515 - DNA, 174 bp, Homo sapiens
  misc_feature 89, 112, 174: n = A,T,C or G
taagcttggaaccgatctcggatccactagtaacggccgccagtgtgctggaattctgcctatatccattacactggcggccgctcgancatgcatctagagggcccaattngccctatagtgagtcgtattacaattcactggccgtcgttttacaacgtcgtgaatgagaan

SEQ ID NO: 1516 - DNA, 481 bp, Homo sapiens
  misc_feature 440, 481: n = A,T,C or G
gctccaggccctgcagggcccagaggagctgctggagaacctggcagagatggcgtccctggaggtccaggaatgaggggcatgcccggaagtccaggaggaccaggaagtgatgggaaaccagggcctcccggaagtcaaggagaaagtggtcgaccaggtcctcctgggccatctggtccccgaggtcagcctggtgtcatgggcttccccggtcctaaaggaaatgatggtgctcctggtaagaatggagaacgaggtggccctggaggacctggccctcagggtcctcctggaaagaatggtgaaactggacctcaaggacccccagggcctactgggcctggtggtgacaaaggagacacaggaccccctggtccacaaggattacaaggcttgcctggtacaggtggtcctccaggagaaaatggaaaacctgnggaaccaggtccaaagggtgatgccggtgcacaccttcggn

SEQ ID NO: 1517 - DNA, 477 bp, Homo sapiens
  misc_feature 1, 433, 469: n = A,T,C or G
ncgaggtgtgcaccggcatcaccctttggacctggttccccaggttttccattttctcctggaggaccacctgtaccaggcaagccttgtaatccttgtggaccagggggtcctgtgtctcctttgtcaccaccaggcccagtaggccctgggggtccttgaggtccagtttcaccattctttccaggaggaccctgagggccaggtcctccagggccacctcgttctccattcttaccaggagcaccatcatttcctttaggaccggggaagcccatgacaccaggctgacctcggggaccagatggcccaggaggacctggtcgaccactttctccttgacttccgggaggccctggtttcccatcacttcctggtcctcctggacttccgggcatgcccctcatttctggacctccagggacgccatctntgccaggttctccaacagcttctctgggccctgcangggctgga

SEQ ID NO: 1518 - DNA, 42 bp, Homo sapiens
  misc_feature 2, 9, 18, 31: n = A,T,C or G
cnttaccanggagcaccntcatttcctttangaccggcgaag

SEQ ID NO: 1519 - DNA, 573 bp, Homo sapiens
  misc_feature 354, 528: n = A,T,C or G
ctgaaactgtcccatgacagggaaagcaaggaaatgcgagcacaccaggctaagatttctatggaaaatagcaaagccatcagccaagataaatctatcaagaataaagcagaacgggaaaggcgagtcagggagttaaacagcagcaacactaaaaagtttctggaagaaagaaagagacttgccatgaagcagtccaaagaaatggatcagttgaaaaaagtccagcttgaacatctagaattcctagagaaacagaatgagcagcttttgaaatcctgtcatgcagtgtcccaaacgcaaggcgaaggagatgcagcagatggtgaaattggaagccgagatggaccgcanaccagcaacaagtagtatgaaactccaaaatgcaaactgaagcagcaaacccacaaagcatcaaaagactcactcacaaacttctgaacacaaactccatggatgaaagctgtttattttgtttcctttatgtgtaaacaagatgatatctgaaaccagagagacttggaatgnctgactgacttctatttaacagcttgagtattgcattttccttgg

SEQ ID NO: 1520 - DNA, 571 bp, Homo sapiens
ccaaggaaatgcaatactcaagctgttaaatagaagtcagtcagacattccaagtctctctggtttcagatatcatcttgtttacacataaaggaaacaaaataaacagctttcatccatggagtttgtgttcagaagtttgtgagtgagtcttttgatgctttgtgggtttgctgcttcagtttgcattttggagtttcatactactgttgctggtctgcggtccatctcggcttccaatttcaccatctgctgcatctccttcgccttgcgtttgggacactgcatgacaggatttcaaaagctgctcattctgtttctctaggaattctagatgttcaagctggacttttttcaactgatccatttctttggactgcttcatggcaagtctctttctttcttccagaaactttttagtgttgctgctgtttaactccctgactcgcctttcccgttctgctttattcttgatagatttatcttggctgatggctttgctattttccatagaaatcttagcctggtgtgctcgcatttccttgctttccctgtcatgggacagtttcag

SEQ ID NO: 1521 - DNA, 117 bp, Homo sapiens
  misc_feature 22, 51, 68, 75, 83, 96, 110, 113, 116: n = A,T,C or G
accatctgctgcatctccttcnccttgcgtttgggacacatgaatgaccangatttgaaaagctgctnattatgnttctatangaattgtaaatgntcaagctggacttntgnaanc

SEQ ID NO: 1522 - DNA, 123 bp, Homo sapiens
  misc_feature 9, 15, 21, 33, 34, 66, 70, 101, 118: n = A,T,C or G
aaatggggnactcangctgtnaaatagaagccnntcatgacattccaaggccttctctggttgcancatnattcattcttgctatcgacactatataacgncacatagcagacacgtngacag

SEQ ID NO: 1523 - DNA, 461 bp, Homo sapiens
caggcggcggtaggtggcgatctcagcctccagcttgaccttgatgttcagcagggcctcatactcctgggcctggcgctgtccctctgcccgggtctgtgccagctctgactcaaggtgcagcaggatcccgttgagctgctccatctgtagggcgtagcgggcctccacctccctcaggctgttctccaagctggccttcagatttctcatggagtccaggtcgatctccaaggactggactgtacgtctcagctctgtgagcgtcgtctcagcagctccaacctcagcagactgtgtggtgaccactgtggtgctctcctcaatctgctgagaccagtacttgtctagctcctctcggttcttccgagccagctcgtcatattgggcccggatgtctgccatgatcttggcgaggtcctgagatttgggggcatctacctccacggtcaacccagagc

SEQ ID NO: 1524 - DNA, 336 bp, Homo sapiens
  misc_feature 68, 312, 332: n = A,T,C or G
cctacaagcccagattgccagctctgggttgaccgtggaggtagatgcccccaaatctcaggacctcncaagatcatggcagacatccgggcccaatatgacgagctggctccggaagaaccgagaggagctagacaagtactggtctcagcagattgaggagagcaccacagtggtcaccacacagtctgctgaggttggagctgctgagacgacgctcacagagctgagacgtacagtccagtccttggagatcgacctggactccatgagaaatctgaaggccagcttggagaacagcctgagggaggnggaggcccgctaccccctancaaa

SEQ ID NO: 1525 - DNA, 438 bp, Homo sapiens
  misc_feature 20, 48, 61, 62, 70, 72, 91, 96, 103: n = A,T,C or G
atgcccccaaatctcatganctcccctagattattgaagacatccggncccaatatgactnntgtgggtngnaataaccgataggatctanacaantactggnctcagcagattgaggagagcaccacatgtggtcaccacacagtctgctgaggttggagctgctgagacgacgctcacagagctgagacgtacagtccagtccttggagatcgacctggactccatgagaaatctgaaggccagcttggagaacagcctgagggaggtggaggcccgctacgccctacagatggagcagctcaacgggatcctgctgcaccttgagtcagagctggcacagacccgggcagagggacagcgccaggcccaggagtatgaggccctgctgaacatcaaggtcaagctggaggctgagatcgccacctaccgccgctg

SEQ ID NO: 1526 - DNA, 308 bp, Homo sapiens
ccactggctgagttattggcctggcaggtatagagtccgctgttcttctcagtgatgttggagataaagagctcttgtgtgtgttgctggatgttcccatcaatcagccaagaatactgtgcaggtgggttagaggctgcatggcaggagaggctgaggttcacccctggacggtaataggtgtatgagggggaaatggtggggtcgtctgggccatagaggacattcaggatgactgggtcgctgtggtcaacacttaattcgttctggattccacactcatagggtcctacatcattccttgtgac

SEQ ID NO: 1527 - DNA, 87 bp, Homo sapiens
ctgtccaatgacaacaggaccctcactctactcagtgtcacaaggaatgatgtaggaccctatgagtgtggaatccagaacgaatta

SEQ ID NO: 1528 - DNA, 344 bp, Homo sapiens
ccactggctgagttattggcctggcaggtatagagtccgctgttcttctcagtgatgttggagataaagagctcttgtgtgtgttgctggatgttcccatcaatcagccaagaatactgtgcaggtgggttagaggctgcatggcaggagaggctgaggttcacccctggacggtaataggtgtatgagggggaaatggtggggtcgtctgggccatagaggacattcaggatgactgggtcgctgtggtcaacacttaattcgttctggattccacactcatagggtcctacatcattccttgtgacactgagtagagtgagggtcctgttgtcattggacag

SEQ ID NO: 1529 - DNA, 344 bp, Homo sapiens
ctgtccaatgacaacaggaccctcactctactcagtgtcacaaggaatgatgtaggaccctatgagtgtggaatccagaacgaattaagtggtgaccacagcgacccagtcatcctgaatgtcctctatggcccagacgaccccaccatttccccctcatacacctattaccgtccaggggtgaacctcagcctctcctgccatgcagcctctaacccacctgcacagtattcttggctgattgatgggaacatccagcaacacacacaagagctctttatctccaacatcactgagaagaacagcggactctatacctgccaggccaataactcagccagtgg

SEQ ID NO: 1530 - DNA, 201 bp, Homo sapiens
ccagagataccacagtcaaacctggagccaaaaggacacaaaggactctcgacccaaactgccccagaccctctccagaggttggggtgaccaactcatctggactcagacatatgaagaagctctatataaatccaagacaagcaacaaacccttgatgattattcatcacttggatgagtgcccacacagtcaagcttt

SEQ ID NO: 1531 - DNA, 122 bp, Homo sapiens
  misc_feature 108, 114: n = A,T,C or G
ccttcatcctcctccccagctcttctcttcctagatctgcaggctacacctctggctagagccgaggggagagagggactcaagggaaaggcaagcttgaggccaagnatggcntgctgcct

SEQ ID NO: 1532 - DNA, 373 bp, Homo sapiens
ccacaaatggcgtggtccatgtcatcaccaatgttctgcagcctccagccaacagacctcaggaaagaggggatgaacttgcagactctgcgcttgagatcttcaaacaagcatcagcgttttccagggcttcccagaggtctgtgcgactagcccctgtctatcaaaagttattagagaggatgaagcattagcttgaagcactacaggaggaatgcaccacggcagctctccgccaatttctctcagatttccacagagactgtttgaatgttttcaaaaccaagtatcacactttaatgtacatgggccgcaccataatgagatgtgagccttgtgcatgtgggggaggagggagagagatgtacctttt

SEQ ID NO: 1533 - DNA, 373 bp, Homo sapiens
aaaaggtacatctctctccctcctcccccacatgcacaaggctcacatctcattatggtgcggcccatgtacattaaagtgtgatacttggttttgaaaacattcaaacagtctctgtggaaatctgagagaaattggcggagagctgccgtggtgcattcctcctgtagtgcttcaagctaatgcttcatcctctctaataacttttgatagacaggggctagtcgcacagacctctgggaagccctggaaaacgctgatgcttgtttgaagatctcaagcgcagagtctgcaagttcatcccctctttcctgaggtctgttggctggaggctgcagaacattggtgatgacatggaccacgccatttgtgg

SEQ ID NO: 1534 - DNA, 373 bp, Homo sapiens; identical to SEQ ID NO: 1532

SEQ ID NO: 1535 - DNA, 221 bp, Homo sapiens
ccagtcagcagagggacaggaatcattcggccactgttcagacgggagccacacccttctccaatccaagcctggctccagaagatcacaaagagccaaagaaactggcaggtgtccacgcgctccaggccagtgagttggttgtcacttactttttctgtggggaagaaattccataccggaggatgctgaaggctcagagcttgaccctgggccacttt

SEQ ID NO: 1536 - DNA, 464 bp, Homo sapiens
tatagaaacaagtgctaagtgtaccgtattatacttgatgttggtcatttctcagtcctatttctcagttctattattttagaacctagtcagttctttaagattataactggtcctacattaaaataatgcttctcgatgtcagattttacctgtttgctgctgagaacatctctgcctaatttaccaaagccagaccttcagttcaacatgcttccttagcttttcatagttgtctgacatttccatgaaaacaaaggaaccaactttgttttaaccaaactttgtttggttacagttttcaggggagcgtttcttccatgacacacagcaacatcccaaagaaataaacaagtgtgacaaaaaaaaaaacaaacctaaatgctactgttccaaagagcaacttgatggttttttttaatactgagtgcaaaaggtcacccaaattcctatgatgaaatttt

SEQ ID NO: 1537 - DNA, 395 bp, Homo sapiens
cagcagacttatcactggacacactggatgctagaagtaaatggagcaatgtcttcaaagttctgctggaaaaaggctttaatcctagaatcctatatccagccaaaatggcatttgattttaggggtaaaacaaaggtatttcttagtattgaagaatttagagattatgttttgcatatgcccaccttgagagaattactggggaataatataccttagcacgccagggtgactacaaacaatatgctttcctcccccagcatgcatccaaaaatcaacaagtaaaacgaaaatacacttctacccagaaggatggacagctaatagcgtacttggggatgaggagcaaggaatattacagataatacctagatgttaataaagggtatgttt

SEQ ID NO: 1538 - DNA, 396 bp, Homo sapiens
ctgcaggagcaggatcagaagcaagcctatgaaaaacaacagaagcatgcagcgactttcttttatagcaccgcagcatcccaggaagcccagaatcatgatgatggcacctacagcaatcaatatgtccacagcaacgtaggagctagagcctacatcttcagaaccaaaaattgcttgagagtcattgcttactcgtacccatattgctaatgctaggatcaagataccacatagccagaacaagaagttgaaggtaaacatagaatattttatacaggcactcacacctgccatttcggaaaaggattaggaatccagatgccgtgaatttaactattcgttacaggcttgtcctgcaatatgctctggagcaacttgcctgcagagatttct

SEQ ID NO: 1539 - DNA, 555 bp, Homo sapiens
ctgtttcataggctggagatgcactcttctagactgctcgagacagccagagacaggggaggagggaagaaggatactgtggaaagggatggcggggcaaacatttagagctagaagccactactgggccaatgctaaagtttctgtctctaagcctaaaaaagccagtgtagtagggcccttatcactcttagtttgctaggtttcccctctgaaataatgagcagatttagccaggctagcagaaaggaagaggacggggctgtgcaggagttagcagaatcttgattcttgctctatggtcggtacttgcacaggaagtgttggcgcttgttgcattcgttgctgctccaagttaaaaagttgttattggagctcatctcgcacagtgcttgttcccacccatggacttgccagaccaggatctgtacagatacatggccccatcaatccactgccactgctgcctcttctgtgggtcgtgcaggccaatccatatcggctggcttctctgatagccacttatgtactctgctatggtgctggcttcctttt

SEQ ID NO: 1540 - DNA, 358 bp, Homo sapiens
aaaatattaagaatggattaaattttaatattcagaataatctgttcaaacctgagtgtattaagactaagtgtacttgacaattgaatgaattaagcctaaaaacatttctctaagaaaccagtggtccatttaaccatttgatgaaacattattttaatgacttataaaggatagtacagtatactgaaattccacttaaatactgaaatattctactaaatgacattgttttgtctaaatttcctccagaaaaatctgttagcatttcttaaaagtccctcagatttgagggaaattctaaattaggacagttttctctccaaataaatataaatgatcttgagtatttttgttt

SEQ ID NO: 1541 - DNA, 410 bp, Homo sapiens
ccagcgagcacatgaagcggttcttcgtgaactttgtggttgggcaggatccgggctcagacgtcgccttccacttcaatccgcggtttgacggctgggacaaggtggtcttcaacacgttgcagggcgggaagtggggcagcgaggagaggaagaggagcatgcccttcaaaaagggtgccgcctttgagctggtcttcatagtcctggctgagcactacaaggtggtggtaaatggaaatcccttctatgagtacgggcaccggcttcccctacagatggtcacccacctgcaagtggatggggatctgcaacttcaatcaatcaacttcatcggaggccagcccctccggccccagggacccccgatgatgccaccttaccctggtcccggacattgccatcaacag

SEQ ID NO: 1542 - DNA, 335 bp, Homo sapiens; identical to SEQ ID NO: 77

SEQ ID NO: 1543 - DNA, 238 bp, Homo sapiens
ccaaacttgcatttgcattttgcactcatgacgatgatgatgcccatggcgcacagaaccccagcgcagatgagcccgccaacctggaggctgtgccagtcatagtagaaaggactgtttttatcttctaggtcattggcgtccaggacaggaaagcctgccaggaacacaagcaggcccagggtcaccttctgcatgtcagagcgctggcctgtgtggttccccaggctgagcagag

SEQ ID NO: 1544 - DNA, 303 bp, Homo sapiens; identical to SEQ ID NO: 457

SEQ ID NO: 1545 - DNA, 276 bp, Homo sapiens; identical to SEQ ID NO: 363

SEQ ID NO: 1546 - DNA, 344 bp, Homo sapiens; identical to SEQ ID NO: 368

SEQ ID NO: 1547 - DNA, 172 bp, Homo sapiens; identical to SEQ ID NO: 792

SEQ ID NO: 1548 - DNA, 1071 bp, Homo sapiens
aaatgcatatgcttttctttcagcacaaacaacagcaaaaacttttgtaataactaacttacctttgcatgtatgaagaactgagtcatttatttccctaacttactcctctttcaagtaacaggtggcagatcataaaatgaattctttattgtatctacacactccacattctttactgtgtcctactactgtatcttggctccctgctgtattaaacaccatcttaagcacttgttcctgcaggactccttcttgacattttgtctcccccttcaaagtcactcaaagagtgggacttcatcaaaagaaatgaattagtctctatcacaccgaatactaagatttatttcctctgatggtacatagatttctctctcactaagagggtcactctcatagaggaatgtcttgtcagttttatacttgctgaggctagaccgacaataaaaatgagctgggcagttaaattagcatttgttactatattggcctataaaggatcaggttgatgataatacctctaaaaatatgcaataataaaacaatagttatgaaagaaacttgaaaggtttgcaaggtttctcctatccctgttaaaattatcatttattatctctttgtcagtgttagtaaggtaacccatgacagaataatttgagtgatagttcatcatgcagaggatatgatcaagatattacctaatggttttatcctgaaaaaggtgtatacttttagggcactgttaacaatgcgagtgaaaccaagatggtgcaagttccctttgcagatggcgtgggcacacttgatttttattatgagtgaatgtaatctttctgtattttaccagagttacagcaattacctgaaaagtttcctaacattttaataatgttagggatttcgttttggttttagttgtcctcaagagacaacaggttcacagtaatttccatgatgttgggtgtggctaagctggggattggttctgttccccctgctcccgtgtagagaaaagctatatttatactgcattctttctcaactttcaggtaaaacaaactatgattt

SEQ ID NO: 1549 - DNA, 539 bp, Homo sapiens
accacagaagacaactttgatccaatcgatgtttctcagctttttgatgaaccagattctgattctggcctttctttagattcaagtcacaataatacctctgtcatcaagtctaattcctctcactctgtgtgtgatgaaggtgctataggttattgcactgaccatgaatctagttcccatcatgacttagaaggtgctgtaggtggctactacccagaacccagtaagctttgtcacttggatcaaagtgattctgatttccatggagatcttacatttcaacacgtatttcataaccacacttaccacttacagccaactgcaccagaatctacttctgaaccttttccgtggcctgggaagtcacagaagataaggagtagataccttgaagacacagatagaaacttgagccgtgatgaacagcgtgctaaagctttgcatatccctttttctgtagatgaaattgtcggcatgcctgttgattctttcaatagcatgttaagtagatattatctgacagacctacaagtctc

SEQ ID NO: 1550 - DNA, 520 bp, Homo sapiens
aaaactgaaatacctcttaaaataatttgatccccagtgtttgctctttttgaagtaaccaacttactcttaaaaaggatggctgccaagatggaaagtcttactgggttttcatgttaacctattctttggacataactatgaattttgtatacaatgcacttcatgaaaagttgtggctcccccagattgcccacaagtgtgatcttgaagtcctaaacatttgtccatgtaagcttcaaaacagcgttaactgagttattcaagtagcagtacttaaagatacaattcttgaagcagtttcaatggtttctgatccaaataatcagtttctgaacattactacttcacataatagagtccatcttcagtttcttctcactttctctttcccttttgggtttcctttttgtggcctgaggccaccagttctttgggtactatcaagatacttccatcatgggtacactggagagcatagtggttgggattgactggcctaccttggtcatctcttaat

SEQ ID NO: 1551 - DNA, 340 bp, Homo sapiens; identical to SEQ ID NO: 976

SEQ ID NO: 1552 - DNA, 1072 bp, Homo sapiens
aaagtggaagagactagaaataaaaacagttgaaggcaaagtttgacattctataagtttataaaagaggatatatggatgaaatttggttaatttcagaaggcacctcaaggctaaaggctttttgtacttctttcatcaatcaagaagttaacacgcttttattgctattcaagtagcaaaggaaaactactctcacaaacttcagttcaacagagaagaatcaccattaagattgagatatggaattgactaaaaccgaagtctccatacacgttatcaatggagcaactttcctgtgtgctttcaaattaatgaaatcgtgaaagaaaagtcaccattcgccattgtgatgttaatgtgtcattgaagatttcagttactacactaggcactgaagtaccattctggagggctgtccactgtatagaacatttatgaatagaaggtaaggacactctgatgattcccacgaactaggaggattggcggtaggtccttagatagagcttctaaccatgccatgtagagagcactagacacagcaccttttcgtgcaactgggagactcatgacaataatattagctgtgcttgaatgttcctttaataactcatttaacctgatctgccggtatgtcttggtcttataaagttcaagctcattatctgttattcgccatggttcatcttctttcattttatctgcaatatcttgctctttatcatcttcatgaagtctgtatggctcaatgatttcctcaaaagctataatattttctttctttggtttggtattgatatctcctagaaccatgatatcagaaaagtctatccggaacttgctaagcaaagtagccatcgctctccggtcatggtctattctgtttatctttccaccaatgaatactctgatcttacagtctttccattttttcttggtcgtcagaaggtaaggtatcaataaggtcaaacctccatcatcaaaaagccaccagacatcaatagtattctttccttgttttttctgaaactgtgtactagcttcaagaagcttttggtcagctacattt

SEQ ID NO: 1553 - DNA, 384 bp, Homo sapiens
ccttaacacacacacctctgctgttccgcagactgcagtgaaacaattccagggcatgcccccttgcacatacacaatgccaagtcagtttcttccacaacaggccacttactttcccccgtcaccaccaagctcagagcctggaagcccagatagacaagcagagatgctccagaatttaaccccacctccatcctatgctgctacaattgcttctaaactggcaattcacaatccaaatttacccaccaccctgccagttaactcacaaaacatccaacctgtcagatacaatagaaggagtaaccccgatttggagaaacgacgcatccactactgcgattaccctggttgcacaaaagtttataccaagtcttctcattt

SEQ ID NO: 1554 - DNA, 408 bp, Homo sapiens
ctggtcctggccttgctgtcctccagctctgctgaggagtacgtgggcctgtctgcaaaccagtgtgccgtgccagccaaggacagggtggactgcggctacccccatgtcacccccaaggagtgcaacaaccggggctgctgctttgactccaggatccctggagtgccttggtgtttcaagcccctgcaggaagcagaatgcaccttctgaggcacctccagctgcccccggccgggggatgcgaggctcggagcacccttgcccggctgtgattgctgccaggcactgttcatctcagcttttctgtccctttgctcccggcaagcgcttctgctgaaagttcatatctggagcctgatgtcttaacgaataaaggtcccatgctccacccgaaaaaaaaaaaaa

SEQ ID NO: 1555 - DNA, 607 bp, Homo sapiens
ccaagcagggacacaataggaaaaactggaaggtgcgtcgctttgttctaaggaaggatccagctttcctgcattactatgacccttccaaagaagagaacaggccagtgggtgggttttctcttcgtggttcactcgtgtctgctctggaagataatggcgttcccactggggttaaagggaatgtccagggaaacctcttcaaagtgattactaaggatgacacacactattacattcaggccagcagcaaggctgagcgagccgagtggattgaagctatcaaaaagctaacatgacaaggacctgagggaaccaggattcctccctcctaccagatgacacagacaagagttcctggagaatgggagtgttaagacttttgacttctttgtaagttttgtactgctttggagagtgaatgctgccaagagttcctcagattacaaacagcagtggtgccatttccttccccatcttcatgttacaaacctggaaaggctagaacagccattaggcgtcagcatcttgacttttccccagcatcacaaacagccatttcctcgggcaccaaagtaggttccctttgttggaacaattacactgg

SEQ ID NO: 1556 - DNA, 192 bp, Homo sapiens; identical to SEQ ID NO: 1485

SEQ ID NO: 1557 - DNA, 2393 bp, Homo sapiens
atgagttcctatttcgtgaactccaccttccccgtcactctggccagcgggcaggagtccttcctgggccacgtaccgctctattcgtcgggctatcgggacccgctgagacattaccccgcgccctacgggccagggccgggccaggacaagggctttgccacttcctcctattaccgcccggcggggggtggctacggccgagcggcgccctgcgcctacggcccggcgccggccttctaccgcgagaaagagtcggcctgcgcactctccggcgccgacgagcagcccccgttccaccccgagccgcggaagtcggactgcgcgcaggacaagagcgtgttcggcgagacagaagagcagaagtgctccactccggtctacccgtggatgcagcggatgaattcgtgcaacagtgagtgagacttcccggtcgccgtcgccccggctcccctgggcgcccaccccgggacacagaactagtgagcgccccctgccccaatctcccacagggtgctgggtgggcatctcagttaggagatagaagaagattgggcgccggccgggggtctctcgctgtgtcccctattaggcaggagttacaaagtttgcaaagtcccagccgcactgggagccatggggagcaagtgtgctctcctggggcgcctggccagagccggggttccaggacagggaagggagcaggagcctgcagtcactggcttggctttactttgagcccccaacccccctctcccagccctggtagggttccccaaccaaagacggctccattaaaaacggagtgcgtcatgcaagggggtagggggtgacgctgaagaggaagagttgagtctgtctgggactgtgtttccctgtggtggggagctggggcaagatgaggcaccaggaaaggggtggtagtcagaggagggaggaggaataaggggaaggaagagagagggagcaggcggagcgagagagggagaaacaggcgcggggtctcaggttggattatttgttggccttaagtcccaactgatgtccattagccggactcgaaagtgaggagccgttaatgtggactatggatcgatctacgtcattacggattaacggcctggatttatcattgggttggggggatgacggggggtgggaacaagatggatggaaagggagggaaagacaagatgcaactaggaagagacacacctgaccagcccctccccccaggctcaggtgggagttccaactgctcctcccctcccccatctagagtctacagacggcacaggcctaggagactaggagggaatctggagggggcgctggaggagtgcgaaacgggggaagggagccggcagaatagagggcattcccggtactggctggagtctgtgttcgagggtcgactaggggagggggtcctgggcccggtgaccgcaggcctcagcatctccactctgcgtaacaggttcctcctttgggcccagcggccggcgaggccgccagacatacacacgttaccagacgctggagctggagaaggagtttcactacaatcgctacctgacgcggcggcggcgcatcgagatcgcgcacgccctgtgcctgacggagaggcagatcaagatatggttccagaaccgacgcatgaagtggaaaaaggagagcaaactgctcagcgcgtctcagctcagtgccgaggaggaggaagaaaaacaggccgagtaaggtgctggaaagggagggaggacgccgagggaaaggcctgtggggagccacgggcgtcagagagacccgggaaggaaggctctcgggtgggggagccaggacacctgctctccggcgcagacagcggggcccagcgctctcctggacgcccccgccgcacagctcccggcgggtgctctgaggcctcactactcgagcccacccagcatcccgcgtcgtcccttccttcccgaggaactgccctcagcctgatcaggcttcctggtgagaactgaggagcggactcacttgatgtttcctggaagcagagcaaaagttctcttgtccctgtcgcgtctcattttgtccatgtcccccgtgcacggttcaatggtagattcgctgtcctcagcgggggccttgaagactccctgatcccagacctggtcgtctctcccaccccctccccaaagccactggaaggagcacatactacctagaagtaagaagaggagcctcagaagaaaacaaagttctattttattaattttctatgtgttgtgtttgtagtcttgtcttagctctggacgcgaaatacttcgatgatgatgatgatgatgataataataataataataacaacaacaacaacaataataaagatgtgaaaactcgaa

SEQ ID NO: 1558 - DNA, 1360 bp, Homo sapiens
ctttttggtgtaaatctggactctaattctgtaatatatcaaggaatctcgtaaaaccgacactaaaacgtccctgcctacaaatcatccggccaaattatgagttcattgtattatgcgaatgctttattttctaaatatccagcctcaagttcggttttcgctaccggagccttcccagaacaaacttcttgtgcgtttgcttccaacccccagcgcccgggctatggagcgggttcgggcgcttccttcgccgcctcgatgcagggcttgtaccccggcggggggggcatggcgggccagagcgcggccggcgtctacgcggccggctatgggctcgagccgagttccttcaacatgcactgcgcgccctttgagcagaacctctccggggtgtgtcccggcgactccgccaaggcggcgggcgccaaggagcagagggactcggacttggcggccgagagtaacttccggatctacccctggatgcgaagctcaggaactgaccgcaaacgaggccgccagacctacacccgctaccagaccctggagctggagaaagaatttcactacaatcgctacctgacgcggcggcggcgcatcgagatcgcgcacacgctctgcctcacggaaagacagatcaagatttggtttcagaaccggcgcatgaagtggaaaaaggagaacaagaccgcgggcccggggaccaccggccaagacagggctgaagcagaggaggaagaggaagagtgagggatggagaaagggcagaggaagagacatgagaaagggagaggaagagaagcccagctctgggaactgaatcaggaaactcaaatcgaatagggaagtaaaaaaacaaaacaaaaaacaaaaaaaacaaaaaaaaaaccctatttaaatgaaaggagtttaaaaacattttttaaggagggagaaaggagaaattttggtttttcaacactgaaaaaatactacctataggaaagtctgtcaggtttggtttttttgtacaatatgaaaaggatattatctacctgttctgtagctttctggaatttacctccccttttctatgttgctattgtaaggtctttgtaaaatcttgcagttttgtaagccctctttaatgctgtctttgtggactgtgggtctggactaaccctgtggttgcctgccctcctgagcctccgccttcccagcagcggcaccaaggggccttagggagccccaaaacctaccactcgcgtgttccccaagcgcctggctgctgcttcttgcttcccgtcccccagccccatgctcccttttacattctgtgtgtatctaaaggatggaaaaataaaacgcaattaaaaat

SEQ ID NO: 1559 - DNA, 753 bp, Homo sapiens
atgtccatttctgggacgcttagcagctattatgtcgactcgatcataagtcacgagagtgaggacgcgcctccagccaagtttccttctggccagtacgcgagctcgcggcagccgggccacgcggagcacctggagttcccctcgtgcagcttccagcccaaagcgccggtgttcggcgcctcctgggcgccgctgagcccgcacgcgtccgggagcctgccgtccgtctaccacccttacatccagccccagggcgtcccgccggccgagagcaggtacctccgcacctggctggagccggcgccgcgcggcgaagcggccccggggcagggccaggcggcggtgaaggcggagccgctgctgggcgcgcctggggagctgctcaaacagggcacgcccgagtacagtttggaaacttcggcgggcagggaggccgtgctgtctaatcaaagacccggctacggggacaataaaatttgcgaaggaagcgaggacaaagagaggccggatcaaaccaacccctccgccaactggctgcacgctcgctcttcccggaaaaagcgctgtccctacaccaaataccagacgctggagctagagaaggagtttctgttcaatatgtacctcaccagggaccgtaggcacgaagtggccagactcctcaatctgagtgagagacaagtcaaaatctggtttcagaaccggcggatgaaaatgaagaaaatgaataaggagcagggcaaagagtaa

SEQ ID NO: 1560 - protein, 140 aa, Homo sapiens
MSSYFVNSTFPVTLASGQESFLGHVPLYSSGYRDPLRHYPAPYGPGPGQDKGFATSSYYRPAGGGYGRAAPCAYGPAPAFYREKESACALSGADEQPPFHPEPRKSDCAQDKSVFGETEEQKCSTPVYPWMQRMNSCNSE

SEQ ID NO: 1561 - protein, 217 aa, Homo sapiens
MSSLYYANALFSKYPASSSVFATGAFPEQTSCAFASNPQRPGYGAGSGASFAASMQGLYPGGGGMAGQSAAGVYAAGYGLEPSSFNMHCAPFEQNLSGVCPGDSAKAAGAKEQRDSDLAAESNFRIYPWMRSSGTDRKRGRQTYTRYQTLELEKEFHYNRYLTRRRRIEIAHTLCLTERQIKIWFQNRRMKWKKENKTAGPGTTGQDRAEAEEEEEE

SEQ ID NO: 1562 - protein, 250 aa, Homo sapiens
MSISGTLSSYYVDSIISHESEDAPPAKFPSGQYASSRQPGHAEHLEFPSCSFQPKAPVFGASWAPLSPHASGSLPSVYHPYIQPQGVPPAESRYLRTWLEPAPRGEAAPGQGQAAVKAEPLLGAPGELLKQGTPEYSLETSAGREAVLSNQRPGYGDNKICEGSEDKERPDQTNPSANWLHARSSRKKRCPYTKYQTLELEKEFLFNMYLTRDRRHEVARLLNLSERQVKIWFQNRRMKMKKMNKEQGKE

What is claimed:

1. An isolated polynucleotide comprising a sequence selected from the group consisting of:
(a) sequences provided in SEQ ID NOs: 1-1559;
(b) complements of the sequences provided in SEQ ID NOs: 1-1559;
(c) sequences consisting of at least 20 contiguous residues of a sequence provided in SEQ ID NOs: 1-1559;
(d) sequences that hybridize to a sequence provided in SEQ ID NOs: 1-1559, under highly stringent conditions;
(e) sequences having at least 75% identity to a sequence of SEQ ID NOs: 1-1559;
(f) sequences having at least 90% identity to a sequence of SEQ ID NOs: 1-1559; and
(g) degenerate variants of a sequence provided in SEQ ID NOs: 1-1559.

2. An isolated polypeptide comprising an amino acid sequence selected from the group consisting of:
(a) sequences encoded by a polynucleotide of claim 1;
(b) sequences having at least 70% identity to a sequence encoded by a polynucleotide of claim 1;
sequences having at least 90% identity to a sequence encoded by a polynucleotide of claim 1;
amino acid sequences set forth in SEQ ID NOs: 1560-1562;
amino acid sequences having at least 70% identity to a sequence set forth in SEQ ID NOs: 1560-1562;
amino acid sequences having at least 90% identity to a sequence set forth in SEQ ID NOs: 1560-1562.

3. An expression vector comprising a polynucleotide of claim 1 operably linked to an expression control sequence.

4. A host cell transformed or transfected with an expression vector according to claim 3.

5. An isolated antibody, or antigen-binding fragment thereof, that specifically binds to a polypeptide of claim 2.

6. A method for detecting the presence of a cancer in a patient, comprising the steps of:
(a) obtaining a biological sample from the patient;
(b) contacting the biological sample with a binding agent that binds to a polypeptide of claim 2;
(c) detecting in the sample an amount of polypeptide that binds to the binding agent; and
(d) comparing the amount of polypeptide to a predetermined cut-off value and therefrom determining the presence of a cancer in the patient.

7. A fusion protein comprising at least one polypeptide according to claim 2.

8. An oligonucleotide that hybridizes to a sequence recited in SEQ ID NOs: 1-1559 under highly stringent conditions.

9. A method for stimulating and/or expanding T cells specific for a tumor protein, comprising contacting T cells with at least one component selected from the group consisting of:
(a) polypeptides according to claim 2;
(b) polynucleotides according to claim 1; and
(c) antigen-presenting cells that express a polynucleotide according to claim 1,
under conditions and for a time sufficient to permit the stimulation and/or expansion of T cells.

10. An isolated T cell population, comprising T cells prepared according to the method of claim 9.

11. A composition comprising a first component selected from the group consisting of physiologically acceptable carriers and immunostimulants, and a second component selected from the group consisting of:
(a) polypeptides according to claim 2;
(b) polynucleotides according to claim 1;
(c) antibodies according to claim 5;
(d) fusion proteins according to claim 7;
(e) T cell populations according to claim 10; and
(f) antigen presenting cells that express a polypeptide according to claim 2.

12. A method for stimulating an immune response in a patient, comprising administering to the patient a composition of claim 11.

13. A method for the treatment of a colon cancer in a patient, comprising administering to the patient a composition of claim 11.

14. A method for determining the presence of a cancer in a patient, comprising the steps of:
(a) obtaining a biological sample from the patient;
(b) contacting the biological sample with an oligonucleotide according to claim 8;
(c) detecting in the sample an amount of a polynucleotide that hybridizes to the oligonucleotide; and
(d) comparing the amount of polynucleotide that hybridizes to the oligonucleotide to a predetermined cut-off value, and therefrom determining the presence of the cancer in the patient.

15. A diagnostic kit comprising at least one oligonucleotide according to claim 8.

16. A diagnostic kit comprising at least one antibody according to claim 5 and a detection reagent, wherein the detection reagent comprises a reporter group.

17. A method for the treatment of colon cancer in a patient, comprising the steps of:
(a) incubating CD4+ and/or CD8+ T cells isolated from a patient with at least one component selected from the group consisting of: (i) polypeptides according to claim 2; (ii) polynucleotides according to claim 1; and (iii) antigen presenting cells that express a polypeptide of claim 2, such that T cell proliferate;
(b) administering to the patient an effective amount of the proliferated T cells,
and thereby inhibiting the development of a cancer in the patient.
